(19) United States
(12) Patent Application Publication
(10) Pub. No.: US 2017/0073689 A1
(43) Pub. Date: Mar. 16, 2017

(54) MODULATORS OF GROWTH HORMONE RECEPTOR

(71) Applicant: Ionis Pharmaceuticals, Inc., Carlsbad, CA (US)

(72) Inventors: Sanjay BHANOT, Carlsbad, CA (US); Susan M FREIER, San Diego, CA (US); Huynh-hoa BUI, Carlsbad, CA (US)

(73) Assignee: Ionis Pharmaceuticals, Inc., Carlsbad, CA (US)

(21) Appl. No.: 14/902,446

(22) PCT Filed: Jul. 1, 2014
(86) PCT No.: PCT/US14/45088

§ 371 Date: Dec. 31, 2015

Related U.S. Application Data
(60) Provisional application No. 61/842,302, filed on Jul. 2, 2013.

(51) Int. Cl. C12N 15/113

(52) U.S. Cl. CPC C12N 15/1138; C12N 2310/11; C12N 2310/321; C12N 2310/323; C12N 2310/32; C12N 2310/315; C12N 2310/3341; C12N 2310/341; C12N 2310/344

(57) ABSTRACT

The present embodiments provide methods, compounds, and compositions for treating, preventing, ameliorating a disease associated with excess growth hormone using antisense compounds oligonucleotides targeted to growth hormone receptor (GHR).

### FIELD

[0001] The present embodiments provide methods, compounds, and compositions for treating, preventing, or ameliorating a disease associated with excess growth hormone using antisense compounds or oligonucleotides targeted to growth hormone receptor (GHR).

### SEQUENCE LISTING

[0002] The present application is being filed along with a Sequence Listing in electronic format. The Sequence Listing is provided as a file entitled BIOL0226WOSEQ_ST25.txt, created on Jun. 30, 2014, which is 1028 Kb in size. The information in the electronic format of the sequence listing is incorporated herein by reference in its entirety.

### BACKGROUND

[0003] Growth hormone is produced in the pituitary and secreted into the bloodstream where it binds to growth hormone receptor (GHR) on many cell types, causing production of insulin-like growth factor-1 (IGF-1). IGF-1 is produced mainly in the liver, but also in adipose tissue and the kidney, and secreted into the bloodstream. Several disorders, such as acromegaly and gigantism, are associated with elevated growth hormone levels and/or elevated IGF-I levels in plasma and/or tissues.

[0004] Excessive production of growth hormone can lead to diseases such as acromegaly or gigantism. Acromegaly and gigantism are associated with excess growth hormone, often caused by a pituitary tumor, and affects 40-50 per million people worldwide with about 15,000 patients in each of the US and Europe and an annual incidence of about 4-5 per million people. Acromegaly and gigantism are initially characterized by abnormal growth of the hands and feet and bony changes in the facial features. Many of the growth related outcomes are mediated by elevated levels of serum IGF-1.

### SUMMARY

[0005] Embodiments provided herein relate to methods, compounds, and compositions for treating, preventing, or ameliorating a disease associated with excess growth hormone. Several embodiments provided herein are drawn to antisense compounds or oligonucleotides targeted to growth hormone receptor (GHR). Several embodiments are directed to treatment, prevention, or amelioration of acromegaly with antisense compounds or oligonucleotides targeted to growth hormone receptor (GHR).

### DETAILED DESCRIPTION

[0006] It is to be understood that both the foregoing general description and the following detailed description are exemplary and explanatory only and are not restrictive of the invention, as claimed. Herein, the use of the singular includes the plural unless specifically stated otherwise. As used herein, the use of “or” means “and/or” unless stated otherwise. Furthermore, the use of the term “including” as well as other forms, such as “includes” and “included”, is not limiting. Also, terms such as “element” or “component” encompass both elements and components comprising one unit and elements and components that comprise more than one subunit, unless specifically stated otherwise.

[0007] The section headings used herein are for organizational purposes only and are not to be construed as limiting the subject matter described. All documents, or portions of documents, cited in this application, including, but not limited to, patents, patent applications, articles, books, and treatises, are hereby expressly incorporated by reference for the portions of the document discussed herein, as well as in their entirety.

Unless otherwise indicated, the following terms have the following meanings:

[0008] “2′-O-methoxyethyl” (also 2′-MOE and 2′-O(CH₂)₂—OCH₃) refers to an O-methoxy-ethyl modification at the 2′ position of a furanose ring. A 2′-O-methoxyethyl modified sugar is a modified sugar.

[0009] “2′-MOE nucleoside” (also 2′-O-methoxyethyl nucleoside) means a nucleoside comprising a 2′-MOE modified sugar moiety.

[0010] “2′-substituted nucleoside” means a nucleoside comprising a substituent at the 2′-position of the furanosyl ring other than H or OH. In certain embodiments, 2′ substituted nucleosides include nucleosides with bicyclic sugar modifications.

[0011] “3′ target site” refers to the nucleotide of a target nucleic acid which is complementary to the 3′-most nucleotide of a particular antisense compound.

[0012] “5′ target site” refers to the nucleotide of a target nucleic acid which is complementary to the 5′-most nucleotide of a particular antisense compound.

[0013] “5-methylcytosine” means a cytosine modified with a methyl group attached to the 5 position. A 5-methylcytosine is a modified nucleobase.

[0014] “About” means within ±10% of a value. For example, if it is stated, “the compounds affected at least about 70% inhibition of GHR”, it is implied that GHR levels are inhibited within a range of 60% and 80%.

[0015] “Administration” or “administering” refers to routes of introducing an antisense compound provided herein to a subject to perform its intended function. An example of a route of administration that can be used includes, but is not limited to parenteral administration, such as subcutaneous, intravenous, or intramuscular injection or infusion.

[0016] “Amelioration” refers to a lessening of at least one indicator, sign, or symptom of an associated disease, disorder, or condition. In certain embodiments, amelioration includes a delay or slowing in the progression of one or more indicators of a condition or disease. The severity of indicators may be determined by subjective or objective measures, which are known to those skilled in the art.

[0017] “Animal” refers to a human or non-human animal, including, but not limited to, mice, rats, rabbits, dogs, cats, pigs, and non-human primates, including, but not limited to, monkeys and chimpanzees.

[0018] “Antisense activity” means any detectable or measurable activity attributable to the hybridization of an antisense compound to its target nucleic acid. In certain embodiments, antisense activity is a decrease in the amount or expression of a target nucleic acid or protein encoded by such target nucleic acid.

[0019] “Antisense compound” means an oligomeric compound that is capable of undergoing hybridization to a target nucleic acid through hydrogen bonding. Examples of antisense compounds include single-stranded and double-stranded compounds, such as, antisense oligonucleotides, siRNAs, shRNAs, ssRNAs, and occupancy-based compounds.

[0020] “Antisense inhibition” means reduction of target nucleic acid levels in the presence of an antisense compound complementary to a target nucleic acid compared to target nucleic acid levels in the absence of the antisense compound.

[0021] “Antisense mechanisms” are all those mechanisms involving hybridization of a compound with target nucleic acid, wherein the outcome or effect of the hybridization is either target degradation or target occupancy with concomitant stalling of the cellular machinery involving, for example, transcription or splicing.

[0022] “Antisense oligonucleotide” means a single-stranded oligonucleotide having a nucleobase sequence that permits hybridization to a corresponding region or segment of a target nucleic acid.

[0023] “Base complementarity” refers to the capacity for the precise base pairing of nucleobases of an antisense oligonucleotide with corresponding nucleobases in a target nucleic acid (i.e., hybridization), and is mediated by Watson-Crick, Hoogsteen or reversed Hoogsteen hydrogen binding between corresponding nucleobases.

[0024] “Bicyclic sugar moiety” means a modified sugar moiety comprising a 4 to 7 membered ring (including but not limited to a furanosyl) comprising a bridge connecting two atoms of the 4 to 7 membered ring to form a second ring, resulting in a bicyclic structure. In certain embodiments, the 4 to 7 membered ring is a sugar ring. In certain embodiments the 4 to 7 membered ring is a furanosyl. In certain such embodiments, the bridge connects the 2′-carbon and the 4′-carbon of the furanosyl.

[0025] “Bicyclic nucleic acid” or “BNA” or “BNA nucleosides” means nucleic acid monomers having a bridge connecting two carbon atoms between the 4′ and 2′ position of the nucleoside sugar unit, thereby forming a bicyclic sugar. Examples of such bicyclic sugar include, but are not limited to A) α-L-Methyleneoxy (4′-CH₂—O-2′) LNA, (B) β-D-Methyleneoxy (4′-CH₂—O-2′) LNA, (C) Ethyleneoxy (4′-(CH₂)₂—O-2′) LNA, (D) Aminooxy (4′-CH₂—O—N(R)-2′) LNA and (E) Oxyamino (4′-CH₂—N(R)—O-2′) LNA, as depicted below.

[chemical structure]

[0026] As used herein, LNA compounds include, but are not limited to, compounds having at least one bridge between the 4′ and the 2′ position of the sugar wherein each of the bridges independently comprises 1 or from 2 to 4 linked groups independently selected from —[C(R₁)(R₂)]ₙ—, —C(R₁)═C(R₂)—, —C(R₁)═N—, —C(═NR₁)—, —C(═O)—, —C(═S)—, —O—, —Si(R₁)₂—, —S(═O)ₓ and —N(R₁)—; wherein: x is 0, 1, or 2; n is 1, 2, 3, or 4; each R₁ and R₂ is, independently, H, a protecting group, hydroxyl, C₁-C₁₂ alkyl, substituted C₁-C₁₂ alkyl, C₂-C₁₂ alkenyl, substituted C₂-C₁₂ alkenyl, C₂-C₁₂ alkynyl, substituted C₂-C₁₂ alkynyl, C₅-C₂₀ aryl, substituted C₅-C₂₀ aryl, a heterocycle radical, a substituted heterocycle radical, heteroaryl, substituted heteroaryl, C₅-C₇ alicyclic radical, substituted C₅-C₇ alicyclic radical, halogen, OJ₁, NJ₁J₂, SJ₁, N₃, COOJ₁, acyl (C(═O)—H), substituted acyl, CN, sulfonyl (S(═O)₂-J₁), or sulfoxyl (S(═O)-J₁); and each J₁ and J₂ is, independently, H, C₁-C₁₂ alkyl, substituted C₁-C₁₂ alkyl, C₂-C₁₂ alkenyl, substituted C₂-C₁₂ alkenyl, C₂-C₁₂ alkynyl, substituted C₂-C₁₂ alkynyl, C₅-C₂₀ aryl, substituted C₅-C₂₀ aryl, acyl (C(═O)—H), substituted acyl, a heterocycle radical, a substituted heterocycle radical, C₁-C₁₂ aminoalkyl, substituted C₁-C₁₂ aminoalkyl or a protecting group.

[0027] Examples of 4′-2′ bridging groups encompassed within the definition of LNA include, but are not limited to one of formulae: —[C(R₁)(R₂)]ₙ—, —[C(R₁)(R₂)]ₙ—O—, —C(R₁R₂)—N(R₁)—O— or —C(R₁R₂)—O—N(R₁)—. Furthermore, other bridging groups encompassed with the definition of LNA are 4′-CH₂-2′, 4′-(CH₂)₂-2′, 4′-(CH₂)₃-2′, 4′-CH₂—O-2′, 4′-(CH₂)₂—O-2′, 4′-CH₂—O—N(R₁)-2′ and 4′-CH₂—N(R₁)—O-2′-bridges, wherein each R₁ and R₂ is, independently, H, a protecting group or C₁-C₁₂ alkyl.

[0028] Also included within the definition of LNA according to the invention are LNAs in which the 2′-hydroxyl group of the ribosyl sugar ring is connected to the 4′ carbon atom of the sugar ring, thereby forming a methyleneoxy (4′-CH₂—O-2′) bridge to form the bicyclic sugar moiety. The bridge can also be a methylene (—CH₂—) group connecting the 2′ oxygen atom and the 4′ carbon atom, for which the term methyleneoxy (4′-CH₂—O-2′) LNA is used. Furthermore; in the case of the bicylic sugar moiety having an ethylene bridging group in this position, the term ethyleneoxy (4′-CH₂CH₂—O-2′) LNA is used. α-L-methyleneoxy (4′-CH₂—O-2′), an isomer of methyleneoxy (4′-CH₂—O-2′) LNA is also encompassed within the definition of LNA, as used herein.

[0029] “Cap structure” or “terminal cap moiety” means chemical modifications, which have been incorporated at either terminus of an antisense compound.

[0030] “cEt” or “constrained ethyl” means a bicyclic sugar moiety comprising a bridge connecting the 4′-carbon and the 2′-carbon, wherein the bridge has the formula: 4′-CH(CH₃)—O-2′.

[0031] “Constrained ethyl nucleoside” (also cEt nucleoside) means a nucleoside comprising a bicyclic sugar moiety comprising a 4′-CH(CH₃)—O-2′ bridge.

[0032] “Chemically distinct region” refers to a region of an antisense compound that is in some way chemically different than another region of the same antisense compound. For example, a region having 2′-O-methoxyethyl nucleotides is chemically distinct from a region having nucleotides without 2′-O-methoxyethyl modifications.

[0033] “Chimeric antisense compounds” means antisense compounds that have at least 2 chemically distinct regions, each position having a plurality of subunits.

[0034] “Complementarity” means the capacity for pairing between nucleobases of a first nucleic acid and a second nucleic acid.

[0035] “Comprise,” “comprises” and “comprising” will be understood to imply the inclusion of a stated step or element or group of steps or elements but not the exclusion of any other step or element or group of steps or elements.

[0036] “Contiguous nucleobases” means nucleobases immediately adjacent to each other.

[0037] “Deoxyribonucleotide” means a nucleotide having a hydrogen at the 2′ position of the sugar portion of the nucleotide. Deoxyribonucleotides may be modified with any of a variety of substituents.

[0038] “Designing” or “Designed to” refer to the process of designing an oligomeric compound that specifically hybridizes with a selected nucleic acid molecule.

[0039] “Effective amount” means the amount of active pharmaceutical agent sufficient to effectuate a desired physiological outcome in an individual in need of the agent. The effective amount may vary among individuals depending on the health and physical condition of the individual to be treated, the taxonomic group of the individuals to be treated, the formulation of the composition, assessment of the individual's medical condition, and other relevant factors.

[0040] “Efficacy” means the ability to produce a desired effect.

[0041] “Expression” includes all the functions by which a gene's coded information is converted into structures present and operating in a cell. Such structures include, but are not limited to the products of transcription and translation.

[0042] “Fully complementary” or “100% complementary” means each nucleobase of a first nucleic acid has a complementary nucleobase in a second nucleic acid. In certain embodiments, a first nucleic acid is an antisense compound and a target nucleic acid is a second nucleic acid.

[0043] “Gapmer” means a chimeric antisense compound in which an internal region having a plurality of nucleosides that support RNase H cleavage is positioned between external regions having one or more nucleosides, wherein the nucleosides comprising the internal region are chemically distinct from the nucleoside or nucleosides comprising the external regions. The internal region may be referred to as the “gap” and the external regions may be referred to as the “wings.”

[0044] “Growth Hormone Receptor (GHR)” means any nucleic acid or protein of GHR. “GHR nucleic acid” means any nucleic acid encoding GHR. For example, in certain embodiments, a GHR nucleic acid includes a DNA sequence encoding GHR, an RNA sequence transcribed from DNA encoding GHR (including genomic DNA comprising introns and exons), including a non-protein encoding (i.e. non-coding) RNA sequence, and an mRNA sequence encoding GHR. “GHR mRNA” means an mRNA encoding a GHR protein.

[0045] “GHR specific inhibitor” refers to any agent capable of specifically inhibiting GHR RNA and/or GHR protein expression or activity at the molecular level. For example, GHR specific inhibitors include nucleic acids (including antisense compounds), peptides, antibodies, small molecules, and other agents capable of inhibiting the expression of GHR RNA and/or GHR protein.

[0046] “Hybridization” means the annealing of complementary nucleic acid molecules. In certain embodiments, complementary nucleic acid molecules include, but are not limited to, an antisense compound and a nucleic acid target. In certain embodiments, complementary nucleic acid molecules include, but are not limited to, an antisense oligonucleotide and a nucleic acid target.

[0047] “Identifying an animal having, or at risk for having, a disease, disorder and/or condition” means identifying an animal having been diagnosed with the disease, disorder and/or condition or identifying an animal predisposed to develop the disease, disorder and/or condition. Such identification may be accomplished by any method including evaluating an individual's medical history and standard clinical tests or assessments.

[0048] “Immediately adjacent” means there are no intervening elements between the immediately adjacent elements.

[0049] “Individual” means a human or non-human animal selected for treatment or therapy.

[0050] “Inhibiting the expression or activity”? refers to a reduction, blockade of the expression or activity and does not necessarily indicate a total elimination of expression or activity.

[0051] “Internucleoside linkage” refers to the chemical bond between nucleosides.

[0052] “Lengthened” antisense oligonucleotides are those that have one or more additional nucleosides relative to an antisense oligonucleotide disclosed herein.

[0053] “Linked deoxynucleoside” means a nucleic acid base (A, G, C, T, U) substituted by deoxyribose linked by a phosphate ester to form a nucleotide.

[0054] “Linked nucleosides” means adjacent nucleosides linked together by an internucleoside linkage.

[0055] “Mismatch” or “non-complementary nucleobase” refers to the case when a nucleobase of a first nucleic acid is not capable of pairing with the corresponding nucleobase of a second or target nucleic acid.

[0056] “Modified internucleoside linkage” refers to a substitution or any change from a naturally occurring internucleoside bond (i.e. a phosphodiester internucleoside bond).

[0057] “Modified nucleobase” means any nucleobase other than adenine, cytosine, guanine, thymidine, or uracil. An “unmodified nucleobase” means the purine bases adenine (A) and guanine (G), and the pyrimidine bases thymine (T), cytosine (C) and uracil (U).

[0058] “Modified nucleoside” means a nucleoside having, independently, a modified sugar moiety and/or modified nucleobase.

[0059] “Modified nucleotide” means a nucleotide having, independently, a modified sugar moiety, modified internucleoside linkage, or modified nucleobase.

[0060] “Modified oligonucleotide” means an oligonucleotide comprising at least one modified internucleoside linkage, a modified sugar, and/or a modified nucleobase.

[0061] “Modified sugar” means substitution and/or any change from a natural sugar moiety.

[0062] “Modulating” refers to changing or adjusting a feature in a cell, tissue, organ or organism. For example, modulating GHR mRNA can mean to increase or decrease the level of GHR mRNA and/or GHR protein in a cell, tissue, organ or organism. A “modulator” effects the change in the cell, tissue, organ or organism. For example, a GHR antisense compound can be a modulator that decreases the amount of GHR mRNA and/or GHR protein in a cell, tissue, organ or organism.

[0063] “Monomer” refers to a single unit of an oligomer. Monomers include, but are not limited to, nucleosides and nucleotides, whether naturally occurring or modified.

[0064] “Motif” means the pattern of unmodified and modified nucleosides in an antisense compound. “Natural sugar moiety” means a sugar moiety found in DNA (2′-H) or RNA (2′-OH). “Naturally occurring internucleoside linkage” means a 3′ to 5′ phosphodiester linkage.

[0065] “Non-complementary nucleobase” refers to a pair of nucleobases that do not form hydrogen bonds with one another or otherwise support hybridization.

[0066] “Nucleic acid” refers to molecules composed of monomeric nucleotides. A nucleic acid includes, but is not limited to, ribonucleic acids (RNA), deoxyribonucleic acids (DNA), single-stranded nucleic acids, and double-stranded nucleic acids.

[0067] “Nucleobase” means a heterocyclic moiety capable of pairing with a base of another nucleic acid.

[0068] “Nucleobase complementarity” refers to a nucleobase that is capable of base pairing with another nucleobase. For example, in DNA, adenine (A) is complementary to thymine (T). For example, in RNA, adenine (A) is complementary to uracil (U). In certain embodiments, complementary nucleobase refers to a nucleobase of an antisense compound that is capable of base pairing with a nucleobase of its target nucleic acid. For example, if a nucleobase at a certain position of an antisense compound is capable of hydrogen bonding with a nucleobase at a certain position of a target nucleic acid, then the position of hydrogen bonding between the oligonucleotide and the target nucleic acid is considered to be complementary at that nucleobase pair.

[0069] “Nucleobase sequence” means the order of contiguous nucleobases independent of any sugar, linkage, and/or nucleobase modification.

[0070] “Nucleoside” means a nucleobase linked to a sugar.

[0071] “Nucleoside mimetic” includes those structures used to replace the sugar or the sugar and the base and not necessarily the linkage at one or more positions of an oligomeric compound such as for example nucleoside mimetics having morpholino, cyclohexenyl, cyclohexyl, tetrahydropyranyl, bicyclo or tricyclo sugar mimetics, e.g., non furanose sugar units. Nucleotide mimetic includes those structures used to replace the nucleoside and the linkage at one or more positions of an oligomeric compound such as for example peptide nucleic acids or morpholinos (morpholinos linked by —N(H)—C(═O)—O— or other non-phosphodiester linkage). Sugar surrogate overlaps with the slightly broader term nucleoside mimetic but is intended to indicate replacement of the sugar unit (furanose ring) only. The tetrahydropyranyl rings provided herein are illustrative of an example of a sugar surrogate wherein the furanose sugar group has been replaced with a tetrahydropyranyl ring system. “Mimetic” refers to groups that are substituted for a sugar, a nucleobase, and/or internucleoside linkage. Generally, a mimetic is used in place of the sugar or sugar-internucleoside linkage combination, and the nucleobase is maintained for hybridization to a selected target.

[0072] “Nucleotide” means a nucleoside having a phosphate group covalently linked to the sugar portion of the nucleoside.

[0073] “Oligomeric compound” means a polymer of linked monomeric subunits which is capable of hybridizing to at least a region of a nucleic acid molecule.

[0074] “Oligonucleoside” means an oligonucleotide in which the internucleoside linkages do not contain a phosphorus atom.

[0075] “Oligonucleotide” means a polymer of linked nucleosides each of which can be modified or unmodified, independent one from another.

[0076] “Parenteral administration” means administration through injection or infusion. Parenteral administration includes subcutaneous administration, intravenous administration, intramuscular administration, intraarterial administration, intraperitoneal administration, or intracranial administration, e.g. intrathecal or intracerebroventricular administration.

[0077] “Pharmaceutical composition” means a mixture of substances suitable for administering to an individual. For example, a pharmaceutical composition may comprise one or more active pharmaceutical agents and a sterile aqueous solution.

[0078] “Pharmaceutically acceptable salts” means physiologically and pharmaceutically acceptable salts of antisense compounds, i.e., salts that retain the desired biological activity of the parent oligonucleotide and do not impart undesired toxicological effects thereto.

[0079] “Phosphorothioate linkage” means a linkage between nucleosides where the phosphodiester bond is modified by replacing one of the non-bridging oxygen atoms with a sulfur atom. A phosphorothioate linkage is a modified internucleoside linkage.

[0080] “Portion” means a defined number of contiguous (i.e., linked) nucleobases of a nucleic acid. In certain embodiments, a portion is a defined number of contiguous nucleobases of a target nucleic acid. In certain embodiments, a portion is a defined number of contiguous nucleobases of an antisense compound

[0081] “Prevent” refers to delaying or forestalling the onset, development or progression of a disease, disorder, or condition for a period of time from minutes to indefinitely. Prevent also means reducing the risk of developing a disease, disorder, or condition.

[0082] “Prophylactically effective amount” refers to an amount of a pharmaceutical agent that provides a prophylactic or preventative benefit to an animal.

[0083] “Region” is defined as a portion of the target nucleic acid having at least one identifiable structure, function, or characteristic.

[0084] “Ribonucleotide” means a nucleotide having a hydroxy at the 2′ position of the sugar portion of the nucleotide. Ribonucleotides may be modified with any of a variety of substituents.

[0085] “Segments” are defined as smaller or sub-portions of regions within a target nucleic acid.

[0086] “Side effects” means physiological disease and/or conditions attributable to a treatment other than the desired effects. In certain embodiments, side effects include injection site reactions, liver function test abnormalities, renal function abnormalities, liver toxicity, renal toxicity, central nervous system abnormalities, myopathies, and malaise. For example, increased aminotransferase levels in serum may indicate liver toxicity or liver function abnormality. For example, increased bilirubin may indicate liver toxicity or liver function abnormality.

[0087] “Sites,” as used herein, are defined as unique nucleobase positions within a target nucleic acid.

[0088] “Slows progression” means decrease in the development of the said disease.

[0089] “Specifically hybridizable” refers to an antisense compound having a sufficient degree of complementarity between an antisense oligonucleotide and a target nucleic acid to induce a desired effect, while exhibiting minimal or no effects on non-target nucleic acids under conditions in which specific binding is desired, i.e., under physiological conditions in the case of in vivo assays and therapeutic treatments. “Stringent hybridization conditions” or “stringent conditions” refer to conditions under which an oligomeric compound will hybridize to its target sequence, but to a minimal number of other sequences.

[0090] “Subject” means a human or non-human animal selected for treatment or therapy.

[0091] “Target” refers to a protein, the modulation of which is desired.

[0092] “Target gene” refers to a gene encoding a target.

[0093] “Targeting” means the process of design and selection of an antisense compound that will specifically hybridize to a target nucleic acid and induce a desired effect.

[0094] “Target nucleic acid,” “target RNA,” “target RNA transcript” and “nucleic acid target” all mean a nucleic acid capable of being targeted by antisense compounds.

[0095] “Target region” means a portion of a target nucleic acid to which one or more antisense compounds is targeted.

[0096] “Target segment” means the sequence of nucleotides of a target nucleic acid to which an antisense compound is targeted. “5′ target site” refers to the 5′-most nucleotide of a target segment. “3′ target site” refers to the 3′-most nucleotide of a target segment.

[0097] “Therapeutically effective amount” means an amount of a pharmaceutical agent that provides a therapeutic benefit to an individual.

[0098] “Treat” refers to administering a pharmaceutical composition to an animal in order to effect an alteration or improvement of a disease, disorder, or condition in the animal. In certain embodiments, one or more pharmaceutical compositions can be administered to the animal.

[0099] “Unmodified” nucleobases mean the purine bases adenine (A) and guanine (G), and the pyrimidine bases thymine (T), cytosine (C) and uracil (U).

[0100] “Unmodified nucleotide” means a nucleotide composed of naturally occurring nucleobases, sugar moieties, and internucleoside linkages. In certain embodiments, an unmodified nucleotide is an RNA nucleotide (i.e. β-D-ribonucleosides) or a DNA nucleotide (i.e. β-D-deoxyribonucleoside).

### Certain Embodiments

[0101] Certain embodiments provide methods, compounds and compositions for inhibiting growth hormone receptor (GHR) expression.

[0102] Certain embodiments provide antisense compounds targeted to a GHR nucleic acid. In certain embodiments, the GHR nucleic acid has the sequence set forth in GENBANK Accession No. NM_000163.4 (incorporated herein as SEQ ID NO: 1), GENBANK Accession No. NT_006576.16 truncated from nucleotides 42411001 to 42714000 (incorporated herein as SEQ ID NO: 2), GENBANK Accession No X06562.1 (incorporated herein as SEQ ID NO: 3), GENBANK Accession No. DR006395.1 (incorporated herein as SEQ ID NO: 4), GENBANK Accession No. DB052048.1 (incorporated herein as SEQ ID NO: 5), GENBANK Accession No. AF230800.1 (incorporated herein as SEQ ID NO: 6), the complement of GENBANK Accession No. AA398260.1 (incorporated herein as SEQ ID NO: 7), GENBANK Accession No. BC136496.1 (incorporated herein as SEQ ID NO: 8), GENBANK Accession No. NM_001242399.2 (incorporated herein as SEQ ID NO: 9), GENBANK Accession No. NM_001242400.2 (incorporated herein as SEQ ID NO: 10), GENBANK Accession No. NM_001242401.3 (incorporated herein as SEQ ID NO: 11), GENBANK Accession No. NM_001242402.2 (incorporated herein as SEQ ID NO: 12), GENBANK Accession No. NM_001242403.2 (incorporated herein as SEQ ID NO: 13), GENBANK Accession No. NM_001242404.2 (incorporated herein as SEQ ID NO: 14), GENBANK Accession No. NM_001242405.2 (incorporated herein as SEQ ID NO: 15), GENBANK Accession No. NM_001242406.2 (incorporated herein as SEQ ID NO: 16), GENBANK Accession No. NM_001242460.1 (incorporated herein as SEQ ID NO: 17), GENBANK Accession NM_001242461.1 (incorporated herein as SEQ ID NO: 18), or GENBANK Accession No. NM_001242462.1 (incorporated herein as SEQ ID NO: 19).

[0103] Certain embodiments provide a compound comprising a modified oligonucleotide consisting of 10 to 30 linked nucleosides and having a nucleobase sequence comprising at least 8 contiguous nucleobases of any of the nucleobase sequences of SEQ ID NOs: 20-2295.

[0104] Certain embodiments provide a compound comprising a modified oligonucleotide consisting of 10 to 30 linked nucleosides complementary within nucleotides 30-51, 63-82, 103-118, 143-159, 164-197, 206-259, 361-388, 554-585, 625-700, 736-776, 862-887, 923-973, 978-996, 1127-1142, 1170-1195, 1317-1347, 1360-1383, 1418-1449, 1492-1507, 1524-1548, 1597-1634, 1641-1660, 1683-1698, 1744-1768, 1827-1860, 1949-2002, 2072-2092, 2095-2110, 2306-2321, 2665-2683, 2685-2719, 2739-2770, 2859-2880, 2941-2960, 2963-2978, 3037-3052, 3205-3252, 3306-3332, 3371-3386, 3518-3542, 3975-3990, 4041-4087, 4418-4446, 4528-4546, 7231-7246, 7570-7585, 8395-8410, 9153-9168, 9554-9569, 9931-9946, 10549-10564, 11020-11035, 11793-11808, 12214-12229, 12474-12489, 12905-12920, 13400-13415, 13717-13732, 14149-14164, 14540-14555, 15264-15279, 15849-15864, 16530-16545, 17377-17392, 17581-17596, 17943-17958, 18353-18368, 18636-18651, 19256-19271, 19814-19829, 20365-20380, 20979-20994, 21566-21581, 22150-22165, 22803-22818, 29049-29064, 29554-29569, 30245-30260, 30550-30565, 30915-30930, 31468-31483, 32366-32381, 32897-32912, 33187-33202, 33780-33795, 34407-34422, 34846-34861, 35669-35684, 36312-36327, 36812-36827, 37504-37519, 38841-38856, 40250-40265, 40706-40721, 40922-40937, 41424-41439, 41999-42014, 42481-42496, 42700-42715, 43291-43306, 43500-43515, 43947-43962, 44448-44463, 45162-45177, 46010-46025, 46476-46491, 47447-47462, 47752-47767, 48001-48016, 48423-48438, 50195-50210, 50470-50485, 51104-51119, 51756-51771, 52015-52030, 52230-52245, 52588-52603, 53532-53547, or 54645-54660 of SEQ ID NO: 1, wherein said modified oligonucleotide is at least 90% complementary to SEQ ID NO: 1.

[0105] Certain embodiments provide a compound comprising a modified oligonucleotide consisting of 10 to 30 linked nucleosides having a nucleobase sequence comprising a portion of at least 8 contiguous nucleobases 100% complementary to an equal length portion of nucleobases 30-51, 63-82, 103-118, 143-159, 164-197, 206-259, 361-388, 554-585, 625-700, 736-776, 862-887, 923-973, 978-996, 1127-1142, 1170-1195, 1317-1347, 1360-1383, 1418-1449, 1492-1507, 1524-1548, 1597-1634, 1641-1660, 1683-1698, 1744-1768, 1827-1860, 1949-2002, 2072-2092, 2095-2110, 2306-2321, 2665-2683, 2685-2719, 2739-2770, 2859-2880, 2941-2960, 2963-2978, 3037-3052, 3205-3252, 3306-3332, 3371-3386, 3518-3542, 3975-3990, 4041-4087, 4418-4446, 4528-4546, 7231-7246, 7570-7585, 8395-8410, 9153-9168, 9554-9569, 9931-9946, 10549-10564, 11020-11035, 11793-11808, 12214-12229, 12474-12489, 12905-12920, 13400-13415, 13717-13732, 14149-14164, 14540-14555, 15264-15279, 15849-15864, 16530-16545, 17377-17392, 17581-17596, 17943-17958, 18353-18368, 18636-18651, 19256-19271, 19814-19829, 20365-20380, 20979-20994, 21566-21581, 22150-22165, 22803-22818, 29049-29064, 29554-29569, 30245-30260, 30550-30565, 30915-30930, 31468-31483, 32366-32381, 32897-32912, 33187-33202, 33780-33795, 34407-34422, 34846-34861, 35669-35684, 36312-36327, 36812-36827, 37504-37519, 38841-38856, 40250-40265, 40706-40721, 40922-40937, 41424-41439, 41999-42014, 42481-42496, 42700-42715, 43291-43306, 43500-43515, 43947-43962, 44448-44463, 45162-45177, 46010-46025, 46476-46491, 47447-47462, 47752-47767, 48001-48016, 48423-48438, 50195-50210, 50470-50485, 51104-51119, 51756-51771, 52015-52030, 52230-52245, 52588-52603, 53532-53547, or 54645-54660 of SEQ ID NO: 1, wherein the nucleobase sequence of the modified oligonucleotide is complementary to SEQ ID NO: 1.

[0106] Certain embodiments provide a compound comprising a modified oligonucleotide consisting of 10 to 30 linked nucleosides complementary within nucleotides 2571-2586, 2867-3059, 3097-3116, 3341-3695, 4024-4039, 4446-4894, 5392-5817, 6128-6265, 6499-6890, 7231-7246, 8395-8410, 9153-9168, 9554-9569, 9931-9946, 10549-10564, 10660-10679, 11020-11035, 11793-12229, 12469-12920, 13351-13415, 13717-13732, 14149-14164, 14361-14555, 14965-15279, 15849-16001, 16253-16272, 16447-16545, 17130-17149, 17377-17669, 17927-17958, 18353-18368, 18636-18773, 19661-19918, 20288-20470, 20979-20994, 21215-21606, 21820-21837, 22150-22165, 22518-22536, 22803-22818, 26494-26522, 29049-29069, 29323-29489, 30550-30565, 30915-31191, 31468-31483, 32363-32382, 32827-33202, 33635-33795, 34138-34157, 34407-34422, 34845-34864, 35466-35485, 35669-35684, 36023-36042, 36266-36327, 36721-36827, 37032-37130, 37276-37295, 37504-37675, 38094-38118, 38841-38856, 39716-40538, 40706-40937, 41164-41183, 41342-41439, 42141-42164, 42700-42760, 43173-43537, 43765-46025, 46476-46532, 48423-48438, 50072-50210, 50470-50485, 50719-51234, 51747-51797, 52015-52143, 52230-52245, 52573-52652, 53466-54660, 54886-54901, 63751-64662, 64882-65099, 65363-65378, 65600-65615, 65988-66183, 66566-66581, 66978-67080, 67251-67270, 67662-67929, 68727-68742, 69203-69242, 69565-69620, 69889-70145, 70352-70584, 70925-71071, 71314-71329, 71617-71769, 72107-72241, 72584-72670, 73061-73076, 73350-73369, 73689-73723, 74107-74131, 74317-74557, 74947-75009, 75192-75207, 75979-76066, 76410-77095, 77292-77307, 77638-77869, 78122-78326, 79006-79021, 79478-79505, 80277-80292, 80575-80939, 81207-81222, 81524-81543, 81761-81776, 82233-82248, 82738-83198, 83330-83416, 83884-84063, 84381-85964, 86220-86392, 86554-86655, 86901-86920, 87181-87262, 88063-88082, 88293-88308, 88605-88967, 89160-89175, 89940-90255, 90473-90528, 91073-91088, 91273-91292, 91647-91662, 91930-92126, 92356-92371, 93190-93443, 93762-94111, 94374-94389, 94581-94653, 94839-94858, 95292-95583, 95829-95844, 96137-96503, 96793-97013, 97539-97554, 97800-97889, 98132-98151, 98624-98672, 98810-99115, 99258-99273, 99478-99503, 99791-99858, 100281-100300, 100406-100421, 100742-100828, 101080-101103, 101242-101320, 101788-101906, 102549-102568, 103566-103625, 104067-104086, 104277-104858, 105255-105274, 106147-106364, 106632-106647, 106964-107735, 108514-108788, 109336-109505, 109849-109864, 110403-110442, 110701-110974, 111203-111322, 112030-112049, 112499-112514, 112842-112861, 113028-113056, 113646-113665, 113896-113911, 114446-114465, 115087-115106, 119269-119284, 119659-119703, 120376-120497, 120738-120845, 121209-121228, 121823-122013, 122180-122199, 122588-122770, 123031-123050, 123152-123167, 123671-124055, 124413-124608, 125178-125197, 125533-125616, 126357-126434, 126736-126751, 126998-127236, 127454-127682, 128467-128482, 128813-129111, 129976-130013, 130308-130323, 131036-131056, 131286-131305, 131676-131691, 132171-132517, 133168-133241, 133522-133877, 134086-134101, 134240-134259, 134441-134617, 135015-135030, 135431-135519, 135818-135874, 136111-136130, 136282-136595, 136996-137152, 137372-137387, 137750-137765, 138048-138067, 138782-139840, 140343-140358, 140593-140701, 141116-141131, 141591-141719, 142113-142342, 143021-143048, 143185-143486, 143836-144109, 144558-144650, 144990-145078, 145428-145525, 145937-145952, 146235-146386, 147028-147043, 147259-147284, 147671-147686, 148059-148154, 148564-148579, 148904-149084, 149491-149506, 149787-149877, 150236-150251, 150588-151139, 151373-151659, 152201-152388, 152549-152771, 153001-153026, 153349-153364, 153831-154112, 154171-154186, 154502-154521, 154724-154828, 155283-155304, 155591-155616, 155889-155992, 156233-156612, 156847-156907, 157198-157223, 157330-157349, 157552-157567, 157927-158029, 158542-158631, 159216-159267, 159539-159793, 160352-160429, 160812-160827, 161248-161267, 161461-161607, 161821-161969, 162064-162083, 162132-162147, 162531-162770, 163019-163557, 164839-165059, 165419-165575, 165856-165875, 166241-166450, 166837-166852, 167107-167122, 168004-168019, 168760-168823, 169062-169092, 169134-169153, 169601-169711, 170081-170291, 170407-170426, 170703-170814, 171021-171036, 171207-171226, 171431-171568, 171926-171945, 172447-172462, 172733-172956, 173045-173756, 174122-174885, 175014-177830, 178895-180539, 181514-187644, 187857-189904, 190109-194159, 194425-195723, 196536-196873, 197326-197961, 198145-198170, 198307-198381, 198715-199007, 199506-199563, 199816-199838, 200249-200635, 201258-201861, 202079-202094, 202382-202717, 203098-203934, 204181-204740, 205549-205915, 206412-206764, 207510-207532, 209999-210014, 210189-210296, 210502-210583, 210920-211418, 211836-212223, 212606-212816, 213025-213044, 213425-213440, 213825-213933, 214479-214498, 214622-214647, 214884-214951, 215446-215508, 215932-215951, 216192-217595, 218132-218248, 218526-218541, 218734-21219037, 219342-219633, 219886-220705, 221044-221059, 221483-221607, 221947-221962, 222569-222584, 222914-222998, 223436-223451, 223948-224122, 224409-224430, 224717-224769, 225133-225148, 225436-225761, 226785-226898, 227025-227040, 227218-227251, 227485-227500, 227914-228837, 229174-229189, 229423-229438, 229615-229640, 230042-230057, 230313-230595, 231218-231345, 231817-232037, 232088-232408, 232823-232848, 232884-232899, 233210-233225, 233623-233646, 234447-234466, 234876-234918, 235258-235328, 235770-235785, 236071-236213, 236684-237196, 237585-237698, 237949-237557, 244873-244897, 245319-245334, 245701-245780, 246152-246523, 246936-247031, 247203-247240, 247431-247450, 247644-247659, 248223-248363, 248694-248762, 249494-249509, 250001-250020, 250693-250708, 251214-251233, 251601-251637, 251950-252060, 252665-252680, 252838-252863, 253140-253166, 253594-253819, 254036-254083, 254246-254345, 254641-254660, 254905-254920, 255397-255422, 255618-255633, 255992-256704, 257018-257092, 257317-257332, 257818-259305, 259500-259515, 261294-261656, 262021-262036, 262453-262779, 263338-266518, 266861-267131, 267375-268051, 268366-269447, 270038-271850, 271950-271969, 272631-274145, 274205-275747, 275808-276636, 276932-277064, 277391-278380, 278932-279063, 279303-281001, 281587-281610, 282229-283668, 290035-290474, 290924-292550, 292860-294408, 295475-297012, 297587-298115, 298161-298418, 298489-298738, 299082-299187, 299276-299669, 299723-299749, 299788-300504, or 300835-301295 of SEQ ID NO: 2, wherein said modified oligonucleotide is at least 90% complementary to SEQ ID NO: 2.

[0107] Certain embodiments provide a compound comprising a modified oligonucleotide consisting of 10 to 30 linked nucleosides having a nucleobase sequence comprising a portion of at least 8 contiguous nucleobases 100% complementary to an equal length portion of nucleobases 2571-2586, 2867-3059, 3097-3116, 3341-3695, 4024-4039, 4446-4894, 5392-5817, 6128-6265, 6499-6890, 7231-7246, 8395-8410, 9153-9168, 9554-9569, 9931-9946, 10549-10564, 10660-10679, 11020-11035, 11793-12229, 12469-12920, 13351-13415, 13717-13732, 14149-14164, 14361-14555, 14965-15279, 15849-16001, 16253-16272, 16447-16545, 17130-17149, 17377-17669, 17927-17958, 18353-18368, 18636-18773, 19661-19918, 20288-20470, 20979-20994, 21215-21606, 21820-21837, 22150-22165, 22518-22536, 22803-22818, 26494-26522, 29049-29069, 29323-29489, 30550-30565, 30915-31191, 31468-31483, 32363-32382, 32827-33202, 33635-33795, 34138-34157, 34407-34422, 34845-34864, 35466-35485, 35669-35684, 36023-36042, 36266-36327, 36721-36827, 37032-37130, 37276-37295, 37504-37675, 38094-38118, 38841-38856, 39716-40538, 40706-40937, 41164-41183, 41342-41439, 42141-42164, 42700-42760, 43173-43537, 43765-46025, 46476-46532, 48423-48438, 50072-50210, 50470-50485, 50719-51234, 51747-51797, 52015-52143, 52230-52245, 52573-52652, 53466-54660, 54886-54901, 63751-64662, 64882-65099, 65363-65378, 65600-65615, 65988-66183, 66566-66581, 66978-67080, 67251-67270, 67662-67929, 68727-68742, 69203-69242, 69565-69620, 69889-70145, 70352-70584, 70925-71071, 71314-71329, 71617-71769, 72107-72241, 72584-72670, 73061-73076, 73350-73369, 73689-73723, 74107-74131, 74317-74557, 74947-75009, 75192-75207, 75979-76066, 76410-77095, 77292-77307, 77638-77869, 78122-78326, 79006-79021, 79478-79505, 80277-80292, 80575-80939, 81207-81222, 81524-81543, 81761-81776, 82233-82248, 82738-83198, 83330-83416, 83884-84063, 84381-85964, 86220-86392, 86554-86655, 86901-86920, 87181-87262, 88063-88082, 88293-88308, 88605-88967, 89160-89175, 89940-90255, 90473-90528, 91073-91088, 91273-91292, 91647-91662, 91930-92126, 92356-92371, 93190-93443, 93762-94111, 94374-94389, 94581-94653, 94839-94858, 95292-95583, 95829-95844, 96137-96503, 96793-97013, 97539-97554, 97800-97889, 98132-98151, 98624-98672, 98810-99115, 99258-99273, 99478-99503, 99791-99858, 100281-100300, 100406-100421, 100742-100828, 101080-101103, 101242-101320, 101788-101906, 102549-102568, 103566-103625, 104067-104086, 104277-104858, 105255-105274, 106147-106364, 106632-106647, 106964-107735, 108514-108788, 109336-109505, 109849-109864, 110403-110442, 110701-110974, 111203-111322, 112030-112049, 112499-112514, 112842-112861, 113028-113056, 113646-113665, 113896-113911, 114446-114465, 115087-115106, 119269-119284, 119659-119703, 120376-120497, 120738-120845, 121209-121228, 121823-122013, 122180-122199, 122588-122770, 123031-123050, 123152-123167, 123671-124055, 124413-124608, 125178-125197, 125533-125616, 126357-126434, 126736-126751, 126998-127236, 127454-127682, 128467-128482, 128813-129111, 129976-130013, 130308-130323, 131036-131056, 131286-131305, 131676-131691, 132171-132517, 133168-133241, 133522-133877, 134086-134101, 134240-134259, 134441-134617, 135015-135030, 135431-135519, 135818-135874, 136111-136130, 136282-136595, 136996-137152, 137372-137387, 137750-137765, 138048-138067, 138782-139840, 140343-140358, 140593-140701, 141116-141131, 141591-141719, 142113-142342, 143021-143048, 143185-143486, 143836-144109, 144558-144650, 144990-145078, 145428-145525, 145937-145952, 146235-146386, 147028-147043, 147259-147284, 147671-147686, 148059-148154, 148564-148579, 148904-149084, 149491-149506, 149787-149877, 150236-150251, 150588-151139, 151373-151659, 152201-152388, 152549-152771, 153001-153026, 153349-153364, 153831-154112, 154171-154186, 154502-154521, 154724-154828, 155283-155304, 155591-155616, 155889-155992, 156233-156612, 156847-156907, 157198-157223, 157330-157349, 157552-157567, 157927-158029, 158542-158631, 159216-159267, 159539-159793, 160352-160429, 160812-160827, 161248-161267, 161461-161607, 161821-161969, 162064-162083, 162132-162147, 162531-162770, 163019-163557, 164839-165059, 165419-165575, 165856-165875, 166241-166450, 166837-166852, 167107-167122, 168004-168019, 168760-168823, 169062-169092, 169134-169153, 169601-169711, 170081-170291, 170407-170426, 170703-170814, 171021-171036, 171207-171226, 171431-171568, 171926-171945, 172447-172462, 172733-172956, 173045-173756, 174122-174885, 175014-177830, 178895-180539, 181514-187644, 187857-189904, 190109-194159, 194425-195723, 196536-196873, 197326-197961, 198145-198170, 198307-198381, 198715-199007, 199506-199563, 199816-199838, 200249-200635, 201258-201861, 202079-202094, 202382-202717, 203098-203934, 204181-204740, 205549-205915, 206412-206764, 207510-207532, 209999-210014, 210189-210296, 210502-210583, 210920-211418, 211836-212223, 212606-212816, 213025-213044, 213425-213440, 213825-213933, 214479-214498, 214622-214647, 214884-214951, 215446-215508, 215932-215951, 216192-217595, 218132-218248, 218526-218541, 218734-21219037, 219342-219633, 219886-220705, 221044-221059, 221483-221607, 221947-221962, 222569-222584, 222914-222998, 223436-223451, 223948-224122, 224409-224430, 224717-224769, 225133-225148, 225436-225761, 226785-226898, 227025-227040, 227218-227251, 227485-227500, 227914-228837, 229174-229189, 229423-229438, 229615-229640, 230042-230057, 230313-230595, 231218-231345, 231817-232037, 232088-232408, 232823-232848, 232884-232899, 233210-233225, 233623-233646, 234447-234466, 234876-234918, 235258-235328, 235770-235785, 236071-236213, 236684-237196, 237585-237698, 237949-237557, 244873-244897, 245319-245334, 245701-245780, 246152-246523, 246936-247031, 247203-247240, 247431-247450, 247644-247659, 248223-248363, 248694-248762, 249494-249509, 250001-250020, 250693-250708, 251214-251233, 251601-251637, 251950-252060, 252665-252680, 252838-252863, 253140-253166, 253594-253819, 254036-254083, 254246-254345, 254641-254660, 254905-254920, 255397-255422, 255618-255633, 255992-256704, 257018-257092, 257317-257332, 257818-259305, 259500-259515, 261294-261656, 262021-262036, 262453-262779, 263338-266518, 266861-267131, 267375-268051, 268366-269447, 270038-271850, 271950-271969, 272631-274145, 274205-275747, 275808-276636, 276932-277064, 277391-278380, 278932-279063, 279303-281001, 281587-281610, 282229-283668, 290035-290474, 290924-292550, 292860-294408, 295475-297012, 297587-298115, 298161-298418, 298489-298738, 299082-299187, 299276-299669, 299723-299749, 299788-300504, or 300835-301295 of SEQ ID NO: 2, wherein the nucleobase sequence of the modified oligonucleotide is complementary to SEQ ID NO: 2. In certain aspects, the compound comprises a modified oligonucleotide consisting of 10 to 30 linked nucleosides complementary within nucleotides 155594-155613, 72107-72126, 153921-153940, 159252-159267, 213425-213440, 153004-153019, 155597-155612, 248233-248248 of SEQ ID NO: 2.

[0108] Certain embodiments provide a compound comprising a modified oligonucleotide consisting of 10 to 30 linked nucleosides and having a nucleobase sequence comprising the nucleobase sequence of any one of SEQ ID NOs: 20-2295.

[0109] Certain embodiments provide a compound comprising a modified oligonucleotide consisting of the nucleobase sequence of any one of SEQ ID NOs: 20-2295.

[0110] In certain embodiments, an antisense compound or oligonucleotide targeted to a growth hormone receptor nucleic acid is complementary within the following nucleotide regions of SEQ ID NO: 1: 30-51, 63-82, 103-118, 143-159, 164-197, 206-259, 361-388, 554-585, 625-700, 736-776, 862-887, 923-973, 978-996, 1127-1142, 1170-1195, 1317-1347, 1360-1383, 1418-1449, 1492-1507, 1524-1548, 1597-1634, 1641-1660, 1683-1698, 1744-1768, 1827-1860, 1949-2002, 2072-2092, 2095-2110, 2306-2321, 2665-2683, 2685-2719, 2739-2770, 2859-2880, 2941-2960, 2963-2978, 3037-3052, 3205-3252, 3306-3332, 3371-3386, 3518-3542, 3975-3990, 4041-4087, 4418-4446, 4528-4546, 7231-7246, 7570-7585, 8395-8410, 9153-9168, 9554-9569, 9931-9946, 10549-10564, 11020-11035, 11793-11808, 12214-12229, 12474-12489, 12905-12920, 13400-13415, 13717-13732, 14149-14164, 14540-14555, 15264-15279, 15849-15864, 16530-16545, 17377-17392, 17581-17596, 17943-17958, 18353-18368, 18636-18651, 19256-19271, 19814-19829, 20365-20380, 20979-20994, 21566-21581, 22150-22165, 22803-22818, 29049-29064, 29554-29569, 30245-30260, 30550-30565, 30915-30930, 31468-31483, 32366-32381, 32897-32912, 33187-33202, 33780-33795, 34407-34422, 34846-34861, 35669-35684, 36312-36327, 36812-36827, 37504-37519, 38841-38856, 40250-40265, 40706-40721, 40922-40937, 41424-41439, 41999-42014, 42481-42496, 42700-42715, 43291-43306, 43500-43515, 43947-43962, 44448-44463, 45162-45177, 46010-46025, 46476-46491, 47447-47462, 47752-47767, 48001-48016, 48423-48438, 50195-50210, 50470-50485, 51104-51119, 51756-51771, 52015-52030, 52230-52245, 52588-52603, 53532-53547, or 54645-54660.

[0111] In certain embodiments, an antisense compound or oligonucleotide targeted to a growth hormone receptor nucleic acid target the following nucleotide regions of SEQ ID NO: 1: 30-51, 63-82, 103-118, 143-159, 164-197, 206-259, 361-388, 554-585, 625-700, 736-776, 862-887, 923-973, 978-996, 1127-1142, 1170-1195, 1317-1347, 1360-1383, 1418-1449, 1492-1507, 1524-1548, 1597-1634, 1641-1660, 1683-1698, 1744-1768, 1827-1860, 1949-2002, 2072-2092, 2095-2110, 2306-2321, 2665-2683, 2685-2719, 2739-2770, 2859-2880, 2941-2960, 2963-2978, 3037-3052, 3205-3252, 3306-3332, 3371-3386, 3518-3542, 3975-3990, 4041-4087, 4418-4446, 4528-4546, 7231-7246, 7570-7585, 8395-8410, 9153-9168, 9554-9569, 9931-9946, 10549-10564, 11020-11035, 11793-11808, 12214-12229, 12474-12489, 12905-12920, 13400-13415, 13717-13732, 14149-14164, 14540-14555, 15264-15279, 15849-15864, 16530-16545, 17377-17392, 17581-17596, 17943-17958, 18353-18368, 18636-18651, 19256-19271, 19814-19829, 20365-20380, 20979-20994, 21566-21581, 22150-22165, 22803-22818, 29049-29064, 29554-29569, 30245-30260, 30550-30565, 30915-30930, 31468-31483, 32366-32381, 32897-32912, 33187-33202, 33780-33795, 34407-34422, 34846-34861, 35669-35684, 36312-36327, 36812-36827, 37504-37519, 38841-38856, 40250-40265, 40706-40721, 40922-40937, 41424-41439, 41999-42014, 42481-42496, 42700-42715, 43291-43306, 43500-43515, 43947-43962, 44448-44463, 45162-45177, 46010-46025, 46476-46491, 47447-47462, 47752-47767, 48001-48016, 48423-48438, 50195-50210, 50470-50485, 51104-51119, 51756-51771, 52015-52030, 52230-52245, 52588-52603, 53532-53547, or 54645-54660.

[0112] In certain embodiments, antisense compounds or oligonucleotides target a region of a growth hormone receptor nucleic acid. In certain embodiments, such compounds or oligonucleotides targeted to a region of a GHR nucleic acid have a contiguous nucleobase portion that is complementary to an equal length nucleobase portion of the region. For example, the portion can be at least an 8, 9, 10, 11, 12, 13, 14, 15, or 16 contiguous nucleobases portion complementary to an equal length portion of a region recited herein. In certain embodiments, such compounds or oligonucleotide target the following nucleotide regions of SEQ ID NO: 1: 30-51, 63-82, 103-118, 143-159, 164-197, 206-259, 361-388, 554-585, 625-700, 736-776, 862-887, 923-973, 978-996, 1127-1142, 1170-1195, 1317-1347, 1360-1383, 1418-1449, 1492-1507, 1524-1548, 1597-1634, 1641-1660, 1683-1698, 1744-1768, 1827-1860, 1949-2002, 2072-2092, 2095-2110, 2306-2321, 2665-2683, 2685-2719, 2739-2770, 2859-2880, 2941-2960, 2963-2978, 3037-3052, 3205-3252, 3306-3332, 3371-3386, 3518-3542, 3975-3990, 4041-4087, 4418-4446, 4528-4546, 7231-7246, 7570-7585, 8395-8410, 9153-9168, 9554-9569, 9931-9946, 10549-10564, 11020-11035, 11793-11808, 12214-12229, 12474-12489, 12905-12920, 13400-13415, 13717-13732, 14149-14164, 14540-14555, 15264-15279, 15849-15864, 16530-16545, 17377-17392, 17581-17596, 17943-17958, 18353-18368, 18636-18651, 19256-19271, 19814-19829, 20365-20380, 20979-20994, 21566-21581, 22150-22165, 22803-22818, 29049-29064, 29554-29569, 30245-30260, 30550-30565, 30915-30930, 31468-31483, 32366-32381, 32897-32912, 33187-33202, 33780-33795, 34407-34422, 34846-34861, 35669-35684, 36312-36327, 36812-36827, 37504-37519, 38841-38856, 40250-40265, 40706-40721, 40922-40937, 41424-41439, 41999-42014, 42481-42496, 42700-42715, 43291-43306, 43500-43515, 43947-43962, 44448-44463, 45162-45177, 46010-46025, 46476-46491, 47447-47462, 47752-47767, 48001-48016, 48423-48438, 50195-50210, 50470-50485, 51104-51119, 51756-51771, 52015-52030, 52230-52245, 52588-52603, 53532-53547, or 54645-54660.

[0113] In certain embodiments, an antisense compound or oligonucleotide targeted to a growth hormone receptor nucleic acid is complementary within the following nucleotide regions of SEQ ID NO: 2: 2571-2586, 2867-3059, 3097-3116, 3341-3695, 4024-4039, 4446-4894, 5392-5817, 6128-6265, 6499-6890, 7231-7246, 8395-8410, 9153-9168, 9554-9569, 9931-9946, 10549-10564, 10660-10679, 11020-11035, 11793-12229, 12469-12920, 13351-13415, 13717-13732, 14149-14164, 14361-14555, 14965-15279, 15849-16001, 16253-16272, 16447-16545, 17130-17149, 17377-17669, 17927-17958, 18353-18368, 18636-18773, 19661-19918, 20288-20470, 20979-20994, 21215-21606, 21820-21837, 22150-22165, 22518-22536, 22803-22818, 26494-26522, 29049-29069, 29323-29489, 30550-30565, 30915-31191, 31468-31483, 32363-32382, 32827-33202, 33635-33795, 34138-34157, 34407-34422, 34845-34864, 35466-35485, 35669-35684, 36023-36042, 36266-36327, 36721-36827, 37032-37130, 37276-37295, 37504-37675, 38094-38118, 38841-38856, 39716-40538, 40706-40937, 41164-41183, 41342-41439, 42141-42164, 42700-42760, 43173-43537, 43765-46025, 46476-46532, 48423-48438, 50072-50210, 50470-50485, 50719-51234, 51747-51797, 52015-52143, 52230-52245, 52573-52652, 53466-54660, 54886-54901, 63751-64662, 64882-65099, 65363-65378, 65600-65615, 65988-66183, 66566-66581, 66978-67080, 67251-67270, 67662-67929, 68727-68742, 69203-69242, 69565-69620, 69889-70145, 70352-70584, 70925-71071, 71314-71329, 71617-71769, 72107-72241, 72584-72670, 73061-73076, 73350-73369, 73689-73723, 74107-74131, 74317-74557, 74947-75009, 75192-75207, 75979-76066, 76410-77095, 77292-77307, 77638-77869, 78122-78326, 79006-79021, 79478-79505, 80277-80292, 80575-80939, 81207-81222, 81524-81543, 81761-81776, 82233-82248, 82738-83198, 83330-83416, 83884-84063, 84381-85964, 86220-86392, 86554-86655, 86901-86920, 87181-87262, 88063-88082, 88293-88308, 88605-88967, 89160-89175, 89940-90255, 90473-90528, 91073-91088, 91273-91292, 91647-91662, 91930-92126, 92356-92371, 93190-93443, 93762-94111, 94374-94389, 94581-94653, 94839-94858, 95292-95583, 95829-95844, 96137-96503, 96793-97013, 97539-97554, 97800-97889, 98132-98151, 98624-98672, 98810-99115, 99258-99273, 99478-99503, 99791-99858, 100281-100300, 100406-100421, 100742-100828, 101080-101103, 101242-101320, 101788-101906, 102549-102568, 103566-103625, 104067-104086, 104277-104858, 105255-105274, 106147-106364, 106632-106647, 106964-107735, 108514-108788, 109336-109505, 109849-109864, 110403-110442, 110701-110974, 111203-111322, 112030-112049, 112499-112514, 112842-112861, 113028-113056, 113646-113665, 113896-113911, 114446-114465, 115087-115106, 119269-119284, 119659-119703, 120376-120497, 120738-120845, 121209-121228, 121823-122013, 122180-122199, 122588-122770, 123031-123050, 123152-123167, 123671-124055, 124413-124608, 125178-125197, 125533-125616, 126357-126434, 126736-126751, 126998-127236, 127454-127682, 128467-128482, 128813-129111, 129976-130013, 130308-130323, 131036-131056, 131286-131305, 131676-131691, 132171-132517, 133168-133241, 133522-133877, 134086-134101, 134240-134259, 134441-134617, 135015-135030, 135431-135519, 135818-135874, 136111-136130, 136282-136595, 136996-137152, 137372-137387, 137750-137765, 138048-138067, 138782-139840, 140343-140358, 140593-140701, 141116-141131, 141591-141719, 142113-142342, 143021-143048, 143185-143486, 143836-144109, 144558-144650, 144990-145078, 145428-145525, 145937-145952, 146235-146386, 147028-147043, 147259-147284, 147671-147686, 148059-148154, 148564-148579, 148904-149084, 149491-149506, 149787-149877, 150236-150251, 150588-151139, 151373-151659, 152201-152388, 152549-152771, 153001-153026, 153349-153364, 153831-154112, 154171-154186, 154502-154521, 154724-154828, 155283-155304, 155591-155616, 155889-155992, 156233-156612, 156847-156907, 157198-157223, 157330-157349, 157552-157567, 157927-158029, 158542-158631, 159216-159267, 159539-159793, 160352-160429, 160812-160827, 161248-161267, 161461-161607, 161821-161969, 162064-162083, 162132-162147, 162531-162770, 163019-163557, 164839-165059, 165419-165575, 165856-165875, 166241-166450, 166837-166852, 167107-167122, 168004-168019, 168760-168823, 169062-169092, 169134-169153, 169601-169711, 170081-170291, 170407-170426, 170703-170814, 171021-171036, 171207-171226, 171431-171568, 171926-171945, 172447-172462, 172733-172956, 173045-173756, 174122-174885, 175014-177830, 178895-180539, 181514-187644, 187857-189904, 190109-194159, 194425-195723, 196536-196873, 197326-197961, 198145-198170, 198307-198381, 198715-199007, 199506-199563, 199816-199838, 200249-200635, 201258-201861, 202079-202094, 202382-202717, 203098-203934, 204181-204740, 205549-205915, 206412-206764, 207510-207532, 209999-210014, 210189-210296, 210502-210583, 210920-211418, 211836-212223, 212606-212816, 213025-213044, 213425-213440, 213825-213933, 214479-214498, 214622-214647, 214884-214951, 215446-215508, 215932-215951, 216192-217595, 218132-218248, 218526-218541, 218734-21219037, 219342-219633, 219886-220705, 221044-221059, 221483-221607, 221947-221962, 222569-222584, 222914-222998, 223436-223451, 223948-224122, 224409-224430, 224717-224769, 225133-225148, 225436-225761, 226785-226898, 227025-227040, 227218-227251, 227485-227500, 227914-228837, 229174-229189, 229423-229438, 229615-229640, 230042-230057, 230313-230595, 231218-231345, 231817-232037, 232088-232408, 232823-232848, 232884-232899, 233210-233225, 233623-233646, 234447-234466, 234876-234918, 235258-235328, 235770-235785, 236071-236213, 236684-237196, 237585-237698, 237949-237557, 244873-244897, 245319-245334, 245701-245780, 246152-246523, 246936-247031, 247203-247240, 247431-247450, 247644-247659, 248223-248363, 248694-248762, 249494-249509, 250001-250020, 250693-250708, 251214-251233, 251601-251637, 251950-252060, 252665-252680, 252838-252863, 253140-253166, 253594-253819, 254036-254083, 254246-254345, 254641-254660, 254905-254920, 255397-255422, 255618-255633, 255992-256704, 257018-257092, 257317-257332, 257818-259305, 259500-259515, 261294-261656, 262021-262036, 262453-262779, 263338-266518, 266861-267131, 267375-268051, 268366-269447, 270038-271850, 271950-271969, 272631-274145, 274205-275747, 275808-276636, 276932-277064, 277391-278380, 278932-279063, 279303-281001, 281587-281610, 282229-283668, 290035-290474, 290924-292550, 292860-294408, 295475-297012, 297587-298115, 298161-298418, 298489-298738, 299082-299187, 299276-299669, 299723-299749, 299788-300504, or 300835-301295.

[0114] In certain embodiments, an antisense compound or oligonucleotide targeted to a growth hormone receptor nucleic acid target the following nucleotide regions of SEQ ID NO: 2: 2571-2586, 2867-3059, 3097-3116, 3341-3695, 4024-4039, 4446-4894, 5392-5817, 6128-6265, 6499-6890, 7231-7246, 8395-8410, 9153-9168, 9554-9569, 9931-9946, 10549-10564, 10660-10679, 11020-11035, 11793-12229, 12469-12920, 13351-13415, 13717-13732, 14149-14164, 14361-14555, 14965-15279, 15849-16001, 16253-16272, 16447-16545, 17130-17149, 17377-17669, 17927-17958, 18353-18368, 18636-18773, 19661-19918, 20288-20470, 20979-20994, 21215-21606, 21820-21837, 22150-22165, 22518-22536, 22803-22818, 26494-26522, 29049-29069, 29323-29489, 30550-30565, 30915-31191, 31468-31483, 32363-32382, 32827-33202, 33635-33795, 34138-34157, 34407-34422, 34845-34864, 35466-35485, 35669-35684, 36023-36042, 36266-36327, 36721-36827, 37032-37130, 37276-37295, 37504-37675, 38094-38118, 38841-38856, 39716-40538, 40706-40937, 41164-41183, 41342-41439, 42141-42164, 42700-42760, 43173-43537, 43765-46025, 46476-46532, 48423-48438, 50072-50210, 50470-50485, 50719-51234, 51747-51797, 52015-52143, 52230-52245, 52573-52652, 53466-54660, 54886-54901, 63751-64662, 64882-65099, 65363-65378, 65600-65615, 65988-66183, 66566-66581, 66978-67080, 67251-67270, 67662-67929, 68727-68742, 69203-69242, 69565-69620, 69889-70145, 70352-70584, 70925-71071, 71314-71329, 71617-71769, 72107-72241, 72584-72670, 73061-73076, 73350-73369, 73689-73723, 74107-74131, 74317-74557, 74947-75009, 75192-75207, 75979-76066, 76410-77095, 77292-77307, 77638-77869, 78122-78326, 79006-79021, 79478-79505, 80277-80292, 80575-80939, 81207-81222, 81524-81543, 81761-81776, 82233-82248, 82738-83198, 83330-83416, 83884-84063, 84381-85964, 86220-86392, 86554-86655, 86901-86920, 87181-87262, 88063-88082, 88293-88308, 88605-88967, 89160-89175, 89940-90255, 90473-90528, 91073-91088, 91273-91292, 91647-91662, 91930-92126, 92356-92371, 93190-93443, 93762-94111, 94374-94389, 94581-94653, 94839-94858, 95292-95583, 95829-95844, 96137-96503, 96793-97013, 97539-97554, 97800-97889, 98132-98151, 98624-98672, 98810-99115, 99258-99273, 99478-99503, 99791-99858, 100281-100300, 100406-100421, 100742-100828, 101080-101103, 101242-101320, 101788-101906, 102549-102568, 103566-103625, 104067-104086, 104277-104858, 105255-105274, 106147-106364, 106632-106647, 106964-107735, 108514-108788, 109336-109505, 109849-109864, 110403-110442, 110701-110974, 111203-111322, 112030-112049, 112499-112514, 112842-112861, 113028-113056, 113646-113665, 113896-113911, 114446-114465, 115087-115106, 119269-119284, 119659-119703, 120376-120497, 120738-120845, 121209-121228, 121823-122013, 122180-122199, 122588-122770, 123031-123050, 123152-123167, 123671-124055, 124413-124608, 125178-125197, 125533-125616, 126357-126434, 126736-126751, 126998-127236, 127454-127682, 128467-128482, 128813-129111, 129976-130013, 130308-130323, 131036-131056, 131286-131305, 131676-131691, 132171-132517, 133168-133241, 133522-133877, 134086-134101, 134240-134259, 134441-134617, 135015-135030, 135431-135519, 135818-135874, 136111-136130, 136282-136595, 136996-137152, 137372-137387, 137750-137765, 138048-138067, 138782-139840, 140343-140358, 140593-140701, 141116-141131, 141591-141719, 142113-142342, 143021-143048, 143185-143486, 143836-144109, 144558-144650, 144990-145078, 145428-145525, 145937-145952, 146235-146386, 147028-147043, 147259-147284, 147671-147686, 148059-148154, 148564-148579, 148904-149084, 149491-149506, 149787-149877, 150236-150251, 150588-151139, 151373-151659, 152201-152388, 152549-152771, 153001-153026, 153349-153364, 153831-154112, 154171-154186, 154502-154521, 154724-154828, 155283-155304, 155591-155616, 155889-155992, 156233-156612, 156847-156907, 157198-157223, 157330-157349, 157552-157567, 157927-158029, 158542-158631, 159216-159267, 159539-159793, 160352-160429, 160812-160827, 161248-161267, 161461-161607, 161821-161969, 162064-162083, 162132-162147, 162531-162770, 163019-163557, 164839-165059, 165419-165575, 165856-165875, 166241-166450, 166837-166852, 167107-167122, 168004-168019, 168760-168823, 169062-169092, 169134-169153, 169601-169711, 170081-170291, 170407-170426, 170703-170814, 171021-171036, 171207-171226, 171431-171568, 171926-171945, 172447-172462, 172733-172956, 173045-173756, 174122-174885, 175014-177830, 178895-180539, 181514-187644, 187857-189904, 190109-194159, 194425-195723, 196536-196873, 197326-197961, 198145-198170, 198307-198381, 198715-199007, 199506-199563, 199816-199838, 200249-200635, 201258-201861, 202079-202094, 202382-202717, 203098-203934, 204181-204740, 205549-205915, 206412-206764, 207510-207532, 209999-210014, 210189-210296, 210502-210583, 210920-211418, 211836-212223, 212606-212816, 213025-213044, 213425-213440, 213825-213933, 214479-214498, 214622-214647, 214884-214951, 215446-215508, 215932-215951, 216192-217595, 218132-218248, 218526-218541, 218734-21219037, 219342-219633, 219886-220705, 221044-221059, 221483-221607, 221947-221962, 222569-222584, 222914-222998, 223436-223451, 223948-224122, 224409-224430, 224717-224769, 225133-225148, 225436-225761, 226785-226898, 227025-227040, 227218-227251, 227485-227500, 227914-228837, 229174-229189, 229423-229438, 229615-229640, 230042-230057, 230313-230595, 231218-231345, 231817-232037, 232088-232408, 232823-232848, 232884-232899, 233210-233225, 233623-233646, 234447-234466, 234876-234918, 235258-235328, 235770-235785, 236071-236213, 236684-237196, 237585-237698, 237949-237557, 244873-244897, 245319-245334, 245701-245780, 246152-246523, 246936-247031, 247203-247240, 247431-247450, 247644-247659, 248223-248363, 248694-248762, 249494-249509, 250001-250020, 250693-250708, 251214-251233, 251601-251637, 251950-252060, 252665-252680, 252838-252863, 253140-253166, 253594-253819, 254036-254083, 254246-254345, 254641-254660, 254905-254920, 255397-255422, 255618-255633, 255992-256704, 257018-257092, 257317-257332, 257818-259305, 259500-259515, 261294-261656, 262021-262036, 262453-262779, 263338-266518, 266861-267131, 267375-268051, 268366-269447, 270038-271850, 271950-271969, 272631-274145, 274205-275747, 275808-276636, 276932-277064, 277391-278380, 278932-279063, 279303-281001, 281587-281610, 282229-283668, 290035-290474, 290924-292550, 292860-294408, 295475-297012, 297587-298115, 298161-298418, 298489-298738, 299082-299187, 299276-299669, 299723-299749, 299788-300504, or 300835-301295.

[0115] In certain embodiments, antisense compounds or oligonucleotides target a region of a growth hormone receptor nucleic acid. In certain embodiments, such compounds or oligonucleotides targeted to a region of a GHR nucleic acid have a contiguous nucleobase portion that is complementary to an equal length nucleobase portion of the region. For example, the portion can be at least an 8, 9, 10, 11, 12, 13, 14, 15, or 16 contiguous nucleobases portion complementary to an equal length portion of a region recited herein. In certain embodiments, such compounds or oligonucleotide target the following nucleotide regions of SEQ ID NO: 2: 2571-2586, 2867-3059, 3097-3116, 3341-3695, 4024-4039, 4446-4894, 5392-5817, 6128-6265, 6499-6890, 7231-7246, 8395-8410, 9153-9168, 9554-9569, 9931-9946, 10549-10564, 10660-10679, 11020-11035, 11793-12229, 12469-12920, 13351-13415, 13717-13732, 14149-14164, 14361-14555, 14965-15279, 15849-16001, 16253-16272, 16447-16545, 17130-17149, 17377-17669, 17927-17958, 18353-18368, 18636-18773, 19661-19918, 20288-20470, 20979-20994, 21215-21606, 21820-21837, 22150-22165, 22518-22536, 22803-22818, 26494-26522, 29049-29069, 29323-29489, 30550-30565, 30915-31191, 31468-31483, 32363-32382, 32827-33202, 33635-33795, 34138-34157, 34407-34422, 34845-34864, 35466-35485, 35669-35684, 36023-36042, 36266-36327, 36721-36827, 37032-37130, 37276-37295, 37504-37675, 38094-38118, 38841-38856, 39716-40538, 40706-40937, 41164-41183, 41342-41439, 42141-42164, 42700-42760, 43173-43537, 43765-46025, 46476-46532, 48423-48438, 50072-50210, 50470-50485, 50719-51234, 51747-51797, 52015-52143, 52230-52245, 52573-52652, 53466-54660, 54886-54901, 63751-64662, 64882-65099, 65363-65378, 65600-65615, 65988-66183, 66566-66581, 66978-67080, 67251-67270, 67662-67929, 68727-68742, 69203-69242, 69565-69620, 69889-70145, 70352-70584, 70925-71071, 71314-71329, 71617-71769, 72107-72241, 72584-72670, 73061-73076, 73350-73369, 73689-73723, 74107-74131, 74317-74557, 74947-75009, 75192-75207, 75979-76066, 76410-77095, 77292-77307, 77638-77869, 78122-78326, 79006-79021, 79478-79505, 80277-80292, 80575-80939, 81207-81222, 81524-81543, 81761-81776, 82233-82248, 82738-83198, 83330-83416, 83884-84063, 84381-85964, 86220-86392, 86554-86655, 86901-86920, 87181-87262, 88063-88082, 88293-88308, 88605-88967, 89160-89175, 89940-90255, 90473-90528, 91073-91088, 91273-91292, 91647-91662, 91930-92126, 92356-92371, 93190-93443, 93762-94111, 94374-94389, 94581-94653, 94839-94858, 95292-95583, 95829-95844, 96137-96503, 96793-97013, 97539-97554, 97800-97889, 98132-98151, 98624-98672, 98810-99115, 99258-99273, 99478-99503, 99791-99858, 100281-100300, 100406-100421, 100742-100828, 101080-101103, 101242-101320, 101788-101906, 102549-102568, 103566-103625, 104067-104086, 104277-104858, 105255-105274, 106147-106364, 106632-106647, 106964-107735, 108514-108788, 109336-109505, 109849-109864, 110403-110442, 110701-110974, 111203-111322, 112030-112049, 112499-112514, 112842-112861, 113028-113056, 113646-113665, 113896-113911, 114446-114465, 115087-115106, 119269-119284, 119659-119703, 120376-120497, 120738-120845, 121209-121228, 121823-122013, 122180-122199, 122588-122770, 123031-123050, 123152-123167, 123671-124055, 124413-124608, 125178-125197, 125533-125616, 126357-126434, 126736-126751, 126998-127236, 127454-127682, 128467-128482, 128813-129111, 129976-130013, 130308-130323, 131036-131056, 131286-131305, 131676-131691, 132171-132517, 133168-133241, 133522-133877, 134086-134101, 134240-134259, 134441-134617, 135015-135030, 135431-135519, 135818-135874, 136111-136130, 136282-136595, 136996-137152, 137372-137387, 137750-137765, 138048-138067, 138782-139840, 140343-140358, 140593-140701, 141116-141131, 141591-141719, 142113-142342, 143021-143048, 143185-143486, 143836-144109, 144558-144650, 144990-145078, 145428-145525, 145937-145952, 146235-146386, 147028-147043, 147259-147284, 147671-147686, 148059-148154, 148564-148579, 148904-149084, 149491-149506, 149787-149877, 150236-150251, 150588-151139, 151373-151659, 152201-152388, 152549-152771, 153001-153026, 153349-153364, 153831-154112, 154171-154186, 154502-154521, 154724-154828, 155283-155304, 155591-155616, 155889-155992, 156233-156612, 156847-156907, 157198-157223, 157330-157349, 157552-157567, 157927-158029, 158542-158631, 159216-159267, 159539-159793, 160352-160429, 160812-160827, 161248-161267, 161461-161607, 161821-161969, 162064-162083, 162132-162147, 162531-162770, 163019-163557, 164839-165059, 165419-165575, 165856-165875, 166241-166450, 166837-166852, 167107-167122, 168004-168019, 168760-168823, 169062-169092, 169134-169153, 169601-169711, 170081-170291, 170407-170426, 170703-170814, 171021-171036, 171207-171226, 171431-171568, 171926-171945, 172447-172462, 172733-172956, 173045-173756, 174122-174885, 175014-177830, 178895-180539, 181514-187644, 187857-189904, 190109-194159, 194425-195723, 196536-196873, 197326-197961, 198145-198170, 198307-198381, 198715-199007, 199506-199563, 199816-199838, 200249-200635, 201258-201861, 202079-202094, 202382-202717, 203098-203934, 204181-204740, 205549-205915, 206412-206764, 207510-207532, 209999-210014, 210189-210296, 210502-210583, 210920-211418, 211836-212223, 212606-212816, 213025-213044, 213425-213440, 213825-213933, 214479-214498, 214622-214647, 214884-214951, 215446-215508, 215932-215951, 216192-217595, 218132-218248, 218526-218541, 218734-21219037, 219342-219633, 219886-220705, 221044-221059, 221483-221607, 221947-221962, 222569-222584, 222914-222998, 223436-223451, 223948-224122, 224409-224430, 224717-224769, 225133-225148, 225436-225761, 226785-226898, 227025-227040, 227218-227251, 227485-227500, 227914-228837, 229174-229189, 229423-229438, 229615-229640, 230042-230057, 230313-230595, 231218-231345, 231817-232037, 232088-232408, 232823-232848, 232884-232899, 233210-233225, 233623-233646, 234447-234466, 234876-234918, 235258-235328, 235770-235785, 236071-236213, 236684-237196, 237585-237698, 237949-237557, 244873-244897, 245319-245334, 245701-245780, 246152-246523, 246936-247031, 247203-247240, 247431-247450, 247644-247659, 248223-248363, 248694-248762, 249494-249509, 250001-250020, 250693-250708, 251214-251233, 251601-251637, 251950-252060, 252665-252680, 252838-252863, 253140-253166, 253594-253819, 254036-254083, 254246-254345, 254641-254660, 254905-254920, 255397-255422, 255618-255633, 255992-256704, 257018-257092, 257317-257332, 257818-259305, 259500-259515, 261294-261656, 262021-262036, 262453-262779, 263338-266518, 266861-267131, 267375-268051, 268366-269447, 270038-271850, 271950-271969, 272631-274145, 274205-275747, 275808-276636, 276932-277064, 277391-278380, 278932-279063, 279303-281001, 281587-281610, 282229-283668, 290035-290474, 290924-292550, 292860-294408, 295475-297012, 297587-298115, 298161-298418, 298489-298738, 299082-299187, 299276-299669, 299723-299749, 299788-300504, or 300835-301295.

[0116] In certain embodiments, antisense compounds or oligonucleotides target intron 1 of a growth hormone receptor nucleic acid. In certain aspects, antisense compounds or oligonucleotides target within nucleotides 3058-144965 (intron 1) of a growth hormone receptor nucleic acid having the nucleobase sequence of SEQ ID NO: 2 (GENBANK Accession No. NT_006576.16 truncated from nucleotides 42411001 to 42714000).

[0117] In certain embodiments, antisense compounds or oligonucleotides target intron 2 of a growth hormone receptor nucleic acid. In certain aspects, antisense compounds or oligonucleotides target within nucleotides 145047-208139 (intron 2) of a growth hormone receptor nucleic acid having the nucleobase sequence of SEQ ID NO: 2 (GENBANK Accession No. NT_006576.16 truncated from nucleotides 42411001 to 42714000).

[0118] In certain embodiments, antisense compounds or oligonucleotides target intron 3 of a growth hormone receptor nucleic acid. In certain aspects, antisense compounds or oligonucleotides target within nucleotides 208206-267991 (intron 3) of a growth hormone receptor nucleic acid having the nucleobase sequence of SEQ ID NO: 2 (GENBANK Accession No. NT_006576.16 truncated from nucleotides 42411001 to 42714000).

[0119] In certain embodiments, antisense compounds or oligonucleotides target intron 4 of a growth hormone receptor nucleic acid. In certain aspects, antisense compounds or oligonucleotides target within nucleotides 268122-274018 (intron 4) of a growth hormone receptor nucleic acid having the nucleobase sequence of SEQ ID NO: 2 (GENBANK Accession No. NT_006576.16 truncated from nucleotides 42411001 to 42714000).

[0120] In certain embodiments, antisense compounds or oligonucleotides target intron 5 of a growth hormone receptor nucleic acid. In certain aspects, antisense compounds or oligonucleotides target within nucleotides 274192-278925 (intron 5) of a growth hormone receptor nucleic acid having the nucleobase sequence of SEQ ID NO: 2 (GENBANK Accession No. NT_006576.16 truncated from nucleotides 42411001 to 42714000).

[0121] In certain embodiments, antisense compounds or oligonucleotides target intron 6 of a growth hormone receptor nucleic acid. In certain aspects, antisense compounds or oligonucleotides target within nucleotides 279105-290308 (intron 6) of a growth hormone receptor nucleic acid having the nucleobase sequence of SEQ ID NO: 2 (GENBANK Accession No. NT_006576.16 truncated from nucleotides 42411001 to 42714000).

[0122] In certain embodiments, antisense compounds or oligonucleotides target intron 7 of a growth hormone receptor nucleic acid. In certain aspects, antisense compounds or oligonucleotides target within nucleotides 290475-292530 (intron 7) of a growth hormone receptor nucleic acid having the nucleobase sequence of SEQ ID NO: 2 (GENBANK Accession No. NT_006576.16 truncated from nucleotides 42411001 to 42714000).

[0123] In certain embodiments, antisense compounds or oligonucleotides target intron 8 of a growth hormone receptor nucleic acid. In certain aspects, antisense compounds or oligonucleotides target within nucleotides 292622-297153 (intron 8) of a growth hormone receptor nucleic acid having the nucleobase sequence of SEQ ID NO: 2 (GENBANK Accession No. NT_006576.16 truncated from nucleotides 42411001 to 42714000).

[0124] In certain embodiments, antisense compounds or oligonucleotides target intron 9 of a growth hormone receptor nucleic acid. In certain aspects, antisense compounds or oligonucleotides target within nucleotides 297224-297554 (intron 9) of a growth hormone receptor nucleic acid having the nucleobase sequence of SEQ ID NO: 2 (GENBANK Accession No. NT_006576.16 truncated from nucleotides 42411001 to 42714000).

[0125] In certain embodiments, any of the foregoing compounds or oligonucleotides comprises at least one modified sugar. In certain aspects, at least one modified sugar comprises a 2′-O-methoxyethyl group. In certain aspects, at least one modified sugar is a bicyclic sugar, such as a 4′-CH(CH3)-O-2′ group, a 4′-CH2-O-2′ group, or a 4′-(CH2)2-O-2′ group. In certain aspects, the modified oligonucleotide comprises at least one modified internucleoside linkage, such as a phosphorothioate internucleoside linkage.

[0126] In certain embodiments, any of the foregoing compounds or oligonucleotides comprises at least one modified nucleobase, such as 5-methylcytosine.

[0127] In certain embodiments, any of the foregoing compounds or oligonucleotides comprises:
[0128] a gap segment consisting of linked deoxynucleosides;
[0129] a 5′ wing segment consisting of linked nucleosides; and
[0130] a 3′ wing segment consisting of linked nucleosides;

[0131] wherein the gap segment is positioned between the 5′ wing segment and the 3′ wing segment and wherein each nucleoside of each wing segment comprises a modified sugar.

[0132] Certain embodiments provide a compound comprising a modified oligonucleotide consisting of 10 to 30 linked nucleosides having a nucleobase sequence comprising the sequence recited in SEQ ID NO: 918, 479, 703, 1800, 1904, 2122, 2127, or 2194.

[0133] In certain aspects, the modified oligonucleotide has a nucleobase sequence comprising the sequence recited in SEQ ID NOs: 918, 479 or 703, wherein the modified oligonucleotide comprises

[0134] a gap segment consisting of ten linked deoxynucleosides;

[0135] a 5′ wing segment consisting of five linked nucleosides; and

[0136] a 3′ wing segment consisting of five linked nucleosides;

[0137] wherein the gap segment is positioned between the 5′ wing segment and the 3′ wing segment, wherein each nucleoside of each wing segment comprises a 2′-O-methoxyethyl sugar; wherein each internucleoside linkage is a phosphorothioate linkage and wherein each cytosine is a 5-methylcytosine.

[0138] In certain aspects, the modified oligonucleotide has a nucleobase sequence comprising the sequence recited in SEQ ID NOs: 1800, 1904, 2122, 2127, or 2194, wherein the modified oligonucleotide comprises:
[0139] a gap segment consisting of ten linked deoxynucleosides;
[0140] a 5′ wing segment consisting of 3 linked nucleosides; and
[0141] a 3′ wing segment consisting of 3 linked nucleosides;

[0142] wherein the gap segment is positioned between the 5′ wing segment and the 3′ wing segment, wherein each nucleoside of each wing segment comprises a 2′-O-methoxyethyl sugar or a constrained ethyl sugar; and wherein each internucleoside linkage is a phosphorothioate linkage.

[0143] Certain embodiments provide a compound comprising a modified oligonucleotide consisting of 20 linked nucleosides having a nucleobase sequence consisting of the sequence recited in SEQ ID NO: 703. In certain aspects, the modified oligonucleotide comprises at least one modified sugar. In certain aspects, the at least one modified sugar comprises a 2′-O-methoxyethyl group. In certain aspects, the at least one modified sugar is a bicyclic sugar, such as a 4′-CH(CH3)-O-2′ group, a 4′-CH2-O-2′ group, or a 4′-(CH2)2-O-2′ group. In certain aspects, the modified oligonucleotide comprises at least one modified internucleoside linkage, such as a phosphorothioate internucleoside linkage. In certain aspects, the modified oligonucleotide comprises at least one modified nucleobase, such as a 5-methylcytosine. In certain aspects, the modified oligonucleotide comprises:
[0144] a gap segment consisting of linked deoxynucleosides;
[0145] a 5′ wing segment consisting of linked nucleosides; and
[0146] a 3′ wing segment consisting of linked nucleosides;

[0147] wherein the gap segment is positioned between the 5′ wing segment and the 3′ wing segment and wherein each nucleoside of each wing segment comprises a modified sugar.

[0148] Certain embodiments provide a compound comprising a modified oligonucleotide consisting of 20 linked nucleosides having a nucleobase sequence consisting of the sequence recited in SEQ ID NO: 703, wherein the modified oligonucleotide comprises:
[0149] a gap segment consisting of ten linked deoxynucleosides;
[0150] a 5′ wing segment consisting of five linked nucleosides; and
[0151] a 3′ wing segment consisting of five linked nucleosides;

[0152] wherein the gap segment is positioned between the 5′ wing segment and the 3′ wing segment; wherein each nucleoside of each wing segment comprises a 2′-O-methoxyethyl sugar; wherein each internucleoside linkage is a phosphorothioate linkage; and wherein each cytosine is a 5-methylcytosine.

[0153] In any of the foregoing embodiments, the compound or oligonucleotide can be at least 85%, at least 90%, at least 95%, at least 98%, at least 99%, or 100% complementary to a nucleic acid encoding growth hormone receptor.

[0154] In any of the foregoing embodiments, the nucleic acid encoding growth hormone receptor can comprise the nucleotide sequence of any one of SEQ ID NOs: 1-19.

[0155] In any of the foregoing embodiments, the compound or oligonucleotide can be single-stranded.

[0156] Certain embodiments provide a composition comprising the compound of any of the aforementioned embodiments or salt thereof and at least one of a pharmaceutically acceptable carrier or diluent. In certain aspects, the composition has a viscosity less than about 40 centipoise (cP), less than about 30 centipose (cP), less than about 20 centipose (cP), less than about 15 centipose (cP), or less than about 10 centipose (cP). In certain aspects, the composition having any of the aforementioned viscosities comprises a compound provided herein at a concentration of about 100 mg/mL, about 125 mg/mL, about 150 mg/mL, about 175 mg/mL, about 200 mg/mL, about 225 mg/mL, about 250 mg/mL, about 275 mg/mL, or about 300 mg/mL. In certain aspects, the composition having any of the aforementioned viscosities and/or compound concentrations has a temperature of room temperature or about 20° C., about 21° C., about 22° C., about 23° C., about 24° C., about 25° C., about 26° C., about 27° C., about 28° C., about 29° C., or about 30° C.

[0157] Certain embodiments provide a method of treating a disease associated with excess growth hormone in a human comprising administering to the human a therapeutically effective amount of the compound or composition of any of the aforementioned embodiments, thereby treating the disease associated with excess growth hormone. In certain aspects, the disease associated with excess growth hormone is acromegaly. In certain aspects, the treatment reduces IGF-1 levels.

[0158] Certain embodiments provide a method of preventing a disease associated with excess growth hormone in a human comprising administering to the human a therapeutically effective amount of a compound or composition of any of the aforementioned embodiments, thereby preventing the disease associated with excess growth hormone. In certain embodiments, the disease associated with excess growth hormone is acromegaly.

[0159] Certain embodiments provide a method of reducing growth hormone receptor (GHR) levels in a human comprising administering to the human a therapeutically effective amount of the compound or composition of any of the aforementioned embodiments, thereby reducing GHR levels in the human. In certain aspects, the human has a disease associated with excess growth hormone. In certain aspects, the disease associated with excess growth hormone is acromegaly.

[0160] In certain aspects, the foregoing methods comprise co-administering the compound or composition and a second agent. In certain aspects, the compound or composition and the second agent are administered concomitantly.

### Antisense Compounds

[0161] Oligomeric compounds include, but are not limited to, oligonucleotides, oligonucleosides, oligonucleotide analogs, oligonucleotide mimetics, antisense compounds, antisense oligonucleotides, and siRNAs. An oligomeric compound may be “antisense” to a target nucleic acid, meaning that is capable of undergoing hybridization to a target nucleic acid through hydrogen bonding.

[0162] In certain embodiments, an antisense compound has a nucleobase sequence that, when written in the 5′ to 3′ direction, comprises the reverse complement of the target segment of a target nucleic acid to which it is targeted. In certain such embodiments, an antisense oligonucleotide has a nucleobase sequence that, when written in the 5′ to 3′ direction, comprises the reverse complement of the target segment of a target nucleic acid to which it is targeted.

[0163] In certain embodiments, an antisense compound is 10 to 30 subunits in length. In certain embodiments, an antisense compound is 12 to 30 subunits in length. In certain embodiments, an antisense compound is 12 to 22 subunits in length. In certain embodiments, an antisense compound is 14 to 30 subunits in length. In certain embodiments, an antisense compound is 14 to 20 subunits in length. In certain embodiments, an antisense compound is 15 to 30 subunits in length. In certain embodiments, an antisense compound is 15 to 20 subunits in length. In certain embodiments, an antisense compound is 16 to 30 subunits in length. In certain embodiments, an antisense compound is 16 to 20 subunits in length. In certain embodiments, an antisense compound is 17 to 30 subunits in length. In certain embodiments, an antisense compound is 17 to 20 subunits in length. In certain embodiments, an antisense compound is 18 to 30 subunits in length. In certain embodiments, an antisense compound is 18 to 21 subunits in length. In certain embodiments, an antisense compound is 18 to 20 subunits in length. In certain embodiments, an antisense compound is 20 to 30 subunits in length. In other words, such antisense compounds are from 12 to 30 linked subunits, 14 to 30 linked subunits, 14 to 20 subunits, 15 to 30 subunits, 15 to 20 subunits, 16 to 30 subunits, 16 to 20 subunits, 17 to 30 subunits, 17 to 20 subunits, 18 to 30 subunits, 18 to 20 subunits, 18 to 21 subunits, 20 to 30 subunits, or 12 to 22 linked subunits, respectively. In certain embodiments, an antisense compound is 14 subunits in length. In certain embodiments, an antisense compound is 16 subunits in length. In certain embodiments, an antisense compound is 17 subunits in length. In certain embodiments, an antisense compound is 18 subunits in length. In certain embodiments, an antisense compound is 19 subunits in length. In certain embodiments, an antisense compound is 20 subunits in length. In other embodiments, the antisense compound is 8 to 80, 12 to 50, 13 to 30, 13 to 50, 14 to 30, 14 to 50, 15 to 30, 15 to 50, 16 to 30, 16 to 50, 17 to 30, 17 to 50, 18 to 22, 18 to 24, 18 to 30, 18 to 50, 19 to 22, 19 to 30, 19 to 50, or 20 to 30 linked subunits. In certain such embodiments, the antisense compounds are 8, 9, 10, 11, 12, 13, 14, 15, 16, 17, 18, 19, 20, 21, 22, 23, 24, 25, 26, 27, 28, 29, 30, 31, 32, 33, 34, 35, 36, 37, 38, 39, 40, 41, 42, 43, 44, 45, 46, 47, 48, 49, 50, 51, 52, 53, 54, 55, 56, 57, 58, 59, 60, 61, 62, 63, 64, 65, 66, 67, 68, 69, 70, 71, 72, 73, 74, 75, 76, 77, 78, 79, or 80 linked subunits in length, or a range defined by any two of the above values. In some embodiments the antisense compound is an antisense oligonucleotide, and the linked subunits are nucleotides.

[0164] In certain embodiments antisense oligonucleotides may be shortened or truncated. For example, a single subunit may be deleted from the 5′ end (5′ truncation), or alternatively from the 3′ end (3′ truncation). A shortened or truncated antisense compound targeted to a GHR nucleic acid may have two subunits deleted from the 5′ end, or alternatively may have two subunits deleted from the 3′ end, of the antisense compound. Alternatively, the deleted nucleosides may be dispersed throughout the antisense compound, for example, in an antisense compound having one nucleoside deleted from the 5′ end and one nucleoside deleted from the 3′ end.

[0165] When a single additional subunit is present in a lengthened antisense compound, the additional subunit may be located at the 5′ or 3′ end of the antisense compound. When two or more additional subunits are present, the added subunits may be adjacent to each other, for example, in an antisense compound having two subunits added to the 5′ end (5′ addition), or alternatively to the 3′ end (3′ addition), of the antisense compound. Alternatively, the added subunits may be dispersed throughout the antisense compound, for example, in an antisense compound having one subunit added to the 5′ end and one subunit added to the 3′ end.

[0166] It is possible to increase or decrease the length of an antisense compound, such as an antisense oligonucleotide, and/or introduce mismatch bases without eliminating activity. For example, in Woolf et al. (Proc. Natl. Acad. Sci. USA 89:7305-7309, 1992), a series of antisense oligonucleotides 13-25 nucleobases in length were tested for their ability to induce cleavage of a target RNA in an oocyte injection model. Antisense oligonucleotides 25 nucleobases in length with 8 or 11 mismatch bases near the ends of the antisense oligonucleotides were able to direct specific cleavage of the target mRNA, albeit to a lesser extent than the antisense oligonucleotides that contained no mismatches. Similarly, target specific cleavage was achieved using 13 nucleobase antisense oligonucleotides, including those with 1 or 3 mismatches.

[0167] Gautschi et al. (J. Natl. Cancer Inst. 93:463-471, March 2001) demonstrated the ability of an oligonucleotide having 100% complementarity to the bcl-2 mRNA and having 3 mismatches to the bcl-xL mRNA to reduce the expression of both bcl-2 and bcl-xL in vitro and in vivo. Furthermore, this oligonucleotide demonstrated potent anti-tumor activity in vivo.

[0168] Maher and Dolnick (Nuc. Acid. Res. 16:3341-3358, 1988) tested a series of tandem 14 nucleobase antisense oligonucleotides, and a 28 and 42 nucleobase antisense oligonucleotides comprised of the sequence of two or three of the tandem antisense oligonucleotides, respectively, for their ability to arrest translation of human DHFR in a rabbit reticulocyte assay. Each of the three 14 nucleobase antisense oligonucleotides alone was able to inhibit translation, albeit at a more modest level than the 28 or 42 nucleobase antisense oligonucleotides.

### Certain Antisense Compound Motifs and Mechanisms

[0169] In certain embodiments, antisense compounds have chemically modified subunits arranged in patterns, or motifs, to confer to the antisense compounds properties such as enhanced inhibitory activity, increased binding affinity for a target nucleic acid, or resistance to degradation by in vivo nucleases.

[0170] Chimeric antisense compounds typically contain at least one region modified so as to confer increased resistance to nuclease degradation, increased cellular uptake, increased binding affinity for the target nucleic acid, and/or increased inhibitory activity. A second region of a chimeric antisense compound may confer another desired property e.g., serve as a substrate for the cellular endonuclease RNase H, which cleaves the RNA strand of an RNA:DNA duplex.

[0171] Antisense activity may result from any mechanism involving the hybridization of the antisense compound (e.g., oligonucleotide) with a target nucleic acid, wherein the hybridization ultimately results in a biological effect. In certain embodiments, the amount and/or activity of the target nucleic acid is modulated. In certain embodiments, the amount and/or activity of the target nucleic acid is reduced. In certain embodiments, hybridization of the antisense compound to the target nucleic acid ultimately results in target nucleic acid degradation. In certain embodiments, hybridization of the antisense compound to the target nucleic acid does not result in target nucleic acid degradation. In certain such embodiments, the presence of the antisense compound hybridized with the target nucleic acid (occupancy) results in a modulation of antisense activity. In certain embodiments, antisense compounds having a particular chemical motif or pattern of chemical modifications are particularly suited to exploit one or more mechanisms. In certain embodiments, antisense compounds function through more than one mechanism and/or through mechanisms that have not been elucidated. Accordingly, the antisense compounds described herein are not limited by particular mechanism.

[0172] Antisense mechanisms include, without limitation, RNase H mediated antisense; RNAi mechanisms, which utilize the RISC pathway and include, without limitation, siRNA, ssRNA and microRNA mechanisms; and occupancy based mechanisms. Certain antisense compounds may act through more than one such mechanism and/or through additional mechanisms.

[0173] RNase H-Mediated Antisense

[0174] In certain embodiments, antisense activity results at least in part from degradation of target RNA by RNase H. RNase H is a cellular endonuclease that cleaves the RNA strand of an RNA:DNA duplex. It is known in the art that single-stranded antisense compounds which are “DNA-like” elicit RNase H activity in mammalian cells. Accordingly, antisense compounds comprising at least a portion of DNA or DNA-like nucleosides may activate RNase H, resulting in cleavage of the target nucleic acid. In certain embodiments, antisense compounds that utilize RNase H comprise one or more modified nucleosides. In certain embodiments, such antisense compounds comprise at least one block of 1-8 modified nucleosides. In certain such embodiments, the modified nucleosides do not support RNase H activity. In certain embodiments, such antisense compounds are gapmers, as described herein. In certain such embodiments, the gap of the gapmer comprises DNA nucleosides. In certain such embodiments, the gap of the gapmer comprises DNA-like nucleosides. In certain such embodiments, the gap of the gapmer comprises DNA nucleosides and DNA-like nucleosides.

[0175] Certain antisense compounds having a gapmer motif are considered chimeric antisense compounds. In a gapmer an internal region having a plurality of nucleotides that supports RNaseH cleavage is positioned between external regions having a plurality of nucleotides that are chemically distinct from the nucleosides of the internal region. In the case of an antisense oligonucleotide having a gapmer motif, the gap segment generally serves as the substrate for endonuclease cleavage, while the wing segments comprise modified nucleosides. In certain embodiments, the regions of a gapmer are differentiated by the types of sugar moieties comprising each distinct region. The types of sugar moieties that are used to differentiate the regions of a gapmer may in some embodiments include β-D-ribonucleosides, β-D-deoxyribonucleosides, 2′-modified nucleosides (such 2′-modified nucleosides may include 2′-MOE and 2′-O—CH₃, among others), and bicyclic sugar modified nucleosides (such bicyclic sugar modified nucleosides may include those having a constrained ethyl). In certain embodiments, nucleosides in the wings may include several modified sugar moieties, including, for example 2′-MOE and bicyclic sugar moieties such as constrained ethyl or LNA. In certain embodiments, wings may include several modified and unmodified sugar moieties. In certain embodiments, wings may include various combinations of 2′-MOE nucleosides, bicyclic sugar moieties such as constrained ethyl nucleosides or LNA nucleosides, and 2′-deoxynucleosides.

[0176] Each distinct region may comprise uniform sugar moieties, variant, or alternating sugar moieties. The wing-gap-wing motif is frequently described as “X-Y-Z”, where “X” represents the length of the 5′-wing, “Y” represents the length of the gap, and “Z” represents the length of the 3′-wing. “X” and “Z” may comprise uniform, variant, or alternating sugar moieties. In certain embodiments, “X” and “Y” may include one or more 2′-deoxynucleosides. “Y” may comprise 2′-deoxynucleosides. As used herein, a gapmer described as “X-Y-Z” has a configuration such that the gap is positioned immediately adjacent to each of the 5′-wing and the 3′ wing. Thus, no intervening nucleotides exist between the 5′-wing and gap, or the gap and the 3′-wing. Any of the antisense compounds described herein can have a gapmer motif. In certain embodiments, “X” and “Z” are the same; in other embodiments they are different. In certain embodiments, “Y” is between 8 and 15 nucleosides. X, Y, or Z can be any of 1, 2, 3, 4, 5, 6, 7, 8, 9, 10, 11, 12, 13, 14, 15, 16, 17, 18, 19, 20, 25, 30 or more nucleosides.

[0177] In certain embodiments, the antisense compound targeted to a GHR nucleic acid has a gapmer motif in which the gap consists of 6, 7, 8, 9, 10, 11, 12, 13, 14, 15, or 16 linked nucleosides.

[0178] In certain embodiments, the antisense oligonucleotide has a sugar motif described by Formula A as follows: (J)ₘ-(B)ₙ-(J)ₚ-(B)ᵣ-(A)ₜ-(D)_{g}-(A)ₜ-(B)_{w}-(J)ₓ-(B)_{y}-(J)_{z}

[0179] wherein:

[0180] each A is independently a 2′-substituted nucleoside;

[0181] each B is independently a bicyclic nucleoside;

[0182] each J is independently either a 2′-substituted nucleoside or a 2′-deoxynucleoside;

[0183] each D is a 2′-deoxynucleoside;

[0184] m is 0-4; n is 0-2; p is 0-2; r is 0-2; t is 0-2; v is 0-2; w is 0-4; x is 0-2; y is 0-2; z is 0-4; g is 6-14; provided that:

[0185] at least one of m, n, and r is other than 0;

[0186] at least one of w and y is other than 0;

[0187] the sum of m, n, p, r, and t is from 2 to 5; and

[0188] the sum of v, w, x, y, and z is from 2 to 5.

### RNAi Compounds

[0189] In certain embodiments, antisense compounds are interfering RNA compounds (RNAi), which include double-stranded RNA compounds (also referred to as short-interfering RNA or siRNA) and single-stranded RNAi compounds (or ssRNA). Such compounds work at least in part through the RISC pathway to degrade and/or sequester a target nucleic acid (thus, include microRNA/microRNA-mimic compounds). In certain embodiments, antisense compounds comprise modifications that make them particularly suited for such mechanisms.

[0190] i. ssRNA Compounds

[0191] In certain embodiments, antisense compounds including those particularly suited for use as single-stranded RNAi compounds (ssRNA) comprise a modified 5′-terminal end. In certain such embodiments, the 5′-terminal end comprises a modified phosphate moiety. In certain embodiments, such modified phosphate is stabilized (e.g., resistant to degradation/cleavage compared to unmodified 5′-phosphate). In certain embodiments, such 5′-terminal nucleosides stabilize the 5′-phosphorous moiety. Certain modified 5′-terminal nucleosides may be found in the art, for example in WO/2011/139702.

[0192] In certain embodiments, the 5′-nucleoside of an ssRNA compound has Formula IIc:

[chemical structure]

wherein:

[0193] T₁ is an optionally protected phosphorus moiety;

[0194] T₂ is an internucleoside linking group linking the compound of Formula IIc to the oligomeric compound;

[0195] A has one of the formulas:

[chemical structure]

[0196] Q₁ and Q₂ are each, independently, H, halogen, C₁-C₆ alkyl, substituted C₁-C₆ alkyl, C₁-C₆ alkoxy, substituted C₁-C₆ alkoxy, C₂-C₆ alkenyl, substituted C₂-C₆ alkenyl, C₂-C₆ alkynyl, substituted C₂-C₆ alkynyl or N(R₃)(R₄);

[0197] Q₃ is O, S, N(R₅) or C(R₆)(R₇);

[0198] each R₃, R₄ R₅, R₆ and R₇ is, independently, H, C₁-C₆ alkyl, substituted C₁-C₆ alkyl or C₁-C₆ alkoxy;

[0199] M₃ is O, S, NR₁₄, C(R₁₅)(R₁₆), C(R₁₅)(R₁₆)C(R₁₇)(R₁₅), C(R₁₅)═C(R₁₇), OC(R₁₅)(R₁₆) or OC(R₁₅)(Bx₂);

[0200] R₁₄ is H, C₁-C₆ alkyl, substituted C₁-C₆ alkyl, C₁-C₆ alkoxy, substituted C₁-C₆ alkoxy, C₂-C₆ alkenyl, substituted C₂-C₆ alkenyl, C₂-C₆ alkynyl or substituted C₂-C₆ alkynyl;

[0201] R₁₅, R₁₆, R₁₇ and R₁₈ are each, independently, H, halogen, C₁-C₆ alkyl, substituted C₁-C₆ alkyl, C₁-C₆ alkoxy, substituted C₁-C₆ alkoxy, C₂-C₆ alkenyl, substituted C₂-C₆ alkenyl, C₂-C₆ alkynyl or substituted C₂-C₆ alkynyl;

[0202] Bx₁ is a heterocyclic base moiety;
[0203] or if Bx₂ is present then Bx₂ is a heterocyclic base moiety and Bx₁ is H, halogen, C₁-C₆ alkyl, substituted C₁-C₆ alkyl, C₁-C₆ alkoxy, substituted C₁-C₆ alkoxy, C₂-C₆ alkenyl, substituted C₂-C₆ alkenyl, C₂-C₆ alkynyl or substituted C₂-C₆ alkynyl;

[0204] J₄, J₅, J₆ and J₇ are each, independently, H, halogen, C₁-C₆ alkyl, substituted C₁-C₆ alkyl, C₁-C₆ alkoxy, substituted C₁-C₆ alkoxy, C₂-C₆ alkenyl, substituted C₂-C₆ alkenyl, C₂-C₆ alkynyl or substituted C₂-C₆ alkynyl;

[0205] or J₄ forms a bridge with one of J₅ or J₇ wherein said bridge comprises from 1 to 3 linked biradical groups selected from O, S, NR₁₉, C(R₂₀)(R₂₁), C(R₂₀)═C(R₂₁), C[═C(R₂₀)(R₂₁)] and C(═O) and the other two of J₅, J₆ and J₇ are each, independently, H, halogen, C₁-C₆ alkyl, substituted C₁-C₆ alkyl, C₁-C₆ alkoxy, substituted C₁-C₆ alkoxy, C₂-C₆ alkenyl, substituted C₂-C₆ alkenyl, C₂-C₆ alkynyl or substituted C₂-C₆ alkynyl;

[0206] each R₁₉, R₂₀ and R₂₁ is, independently, H, C₁-C₆ alkyl, substituted C₁-C₆ alkyl, C₁-C₆ alkoxy, substituted C₁-C₆ alkoxy, C₂-C₆ alkenyl, substituted C₂-C₆ alkenyl, C₂-C₆ alkynyl or substituted C₂-C₆ alkynyl;

[0207] G is H, OH, halogen or O—[C(R₈)(R₉)]ₙ—[(C═O)ₘ—X₁]ⱼ—Z;

[0208] each R₈ and R₉ is, independently, H, halogen, C₁-C₆ alkyl or substituted C₁-C₆ alkyl;

[0209] X₁ is O, S or N(E₁);

[0210] Z is H, halogen, C₁-C₆ alkyl, substituted C₁-C₆ alkyl, C₂-C₆ alkenyl, substituted C₂-C₆ alkenyl, C₂-C₆ alkynyl, substituted C₂-C₆ alkynyl or N(E₂)(E₃);

[0211] E₁, E₂ and E₃ are each, independently, H, C₁-C₆ alkyl or substituted C₁-C₆ alkyl;

[0212] n is from 1 to about 6;

[0213] m is 0 or 1;

[0214] j is 0 or 1;

[0215] each substituted group comprises one or more optionally protected substituent groups independently selected from halogen, OJ₁, N(J₁)(J₂), =NJ₁, SJ₁, N₃, CN, OC(═X₂)J₁, OC(═X₂)N(J₁)(J₂) and C(═X₂)N(J₁)(J₂);

[0216] X₂ is O, S or NJ₃;

[0217] each J₁, J₂ and J₃ is, independently, H or C₁-C₆ alkyl;

[0218] when j is 1 then Z is other than halogen or N(E₂)(E₃); and

[0219] wherein said oligomeric compound comprises from 8 to 40 monomeric subunits and is hybridizable to at least a portion of a target nucleic acid.

[0220] In certain embodiments, M₃ is O, CH═CH, OCH₂ or OC(H)(Bx₂). In certain embodiments, M₃ is O.

[0221] In certain embodiments, J₄, J₅, J₆ and J₇ are each H. In certain embodiments, J₄ forms a bridge with one of J₅ or J₇.

[0222] In certain embodiments, A has one of the formulas:

[chemical structure]

wherein:

[0223] Q₁ and Q₂ are each, independently, H, halogen, C₁-C₆ alkyl, substituted C₁-C₆ alkyl, C₁-C₆ alkoxy or substituted C₁-C₆ alkoxy. In certain embodiments, Q₁ and Q₂ are each H. In certain embodiments, Q₁ and Q₂ are each, independently, H or halogen. In certain embodiments, Q₁ and Q₂ is H and the other of Q₁ and Q₂ is F, CH₃ or OCH₃.

[0224] In certain embodiments, T₁ has the formula:

[chemical structure]

wherein:

[0225] Rₐ and R_{c} are each, independently, protected hydroxyl, protected thiol, C₁-C₆ alkyl, substituted C₁-C₆ alkyl, C₁-C₆ alkoxy, substituted C₁-C₆ alkoxy, protected amino or substituted amino; and

[0226] R_{b} is O or S. In certain embodiments, R_{b} is O and Rₐ and R_{c} are each, independently, OCH₃, OCH₂CH₃ or CH(CH₃)₂.

[0227] In certain embodiments, G is halogen, OCH₃, OCH₂F, OCHF₂, OCF₃, OCH₂CH₃, O(CH₂)₂F, OCH₂CHF₂, OCH₂CF₃, OCH₂—CH═CH₂, O(CH₂)₂—OCH₃, O(CH₂)₂—SCH₃, O(CH₂)₂—OCF₃, O(CH₂)₃—N(R₁₀)(R₁₁), O(CH₂)₂—ON(R₁₀)(R₁₁), O(CH₂)₂—O(CH₂)₂—N(R₁₀)(R₁₁), OCH₂C(═O)—N(R₁₀)(R₁₁), OCH₂C(═O)—N(R₁₂)—(CH₂)₂—N(R₁₀)(R₁₁) or O(CH₂)₂—N(R₁₂)—C(═NR₁₃)[N(R₁₀)(R₁₁)] wherein R₁₀, R₁₁, R₁₂ and R₁₃ are each, independently, H or C₁-C₆ alkyl. In certain embodiments, G is halogen, OCH₃, OCF₃, OCH₂CH₃, OCH₂CF₃, OCH₂—CH═CH₂, O(CH₂)₂—OCH₃, O(CH₂)₂—O(CH₂)₂—N(CH₃)₂, OCH₂C(═O)—N(H)CH₃, OCH₂C(═O)—N(H)—(CH₂)₂—N(CH₃)₂ or OCH₂—N(H)—C(═NH)NH₂. In certain embodiments, G is F, OCH₃ or O(CH₂)₂—OCH₃. In certain embodiments, G is O(CH₂)₂—OCH₃.

[0228] In certain embodiments, the 5′-terminal nucleoside has Formula IIe:

[chemical structure]

[0229] In certain embodiments, antisense compounds, including those particularly suitable for ssRNA comprise one or more type of modified sugar moieties and/or naturally occurring sugar moieties arranged along an oligonucleotide or region thereof in a defined pattern or sugar modification motif. Such motifs may include any of the sugar modifications discussed herein and/or other known sugar modifications.

[0230] In certain embodiments, the oligonucleotides comprise or consist of a region having uniform sugar modifications. In certain such embodiments, each nucleoside of the region comprises the same RNA-like sugar modification. In certain embodiments, each nucleoside of the region is a 2′-F nucleoside. In certain embodiments, each nucleoside of the region is a 2′-OMe nucleoside. In certain embodiments, each nucleoside of the region is a 2′-MOE nucleoside. In certain embodiments, each nucleoside of the region is a cEt nucleoside. In certain embodiments, each nucleoside of the region is an LNA nucleoside. In certain embodiments, the uniform region constitutes all or essentially all of the oligonucleotide. In certain embodiments, the region constitutes the entire oligonucleotide except for 1-4 terminal nucleosides.

[0231] In certain embodiments, oligonucleotides comprise one or more regions of alternating sugar modifications, wherein the nucleosides alternate between nucleotides having a sugar modification of a first type and nucleotides having a sugar modification of a second type. In certain embodiments, nucleosides of both types are RNA-like nucleosides. In certain embodiments the alternating nucleosides are selected from: 2′-OMe, 2′-F, 2′-MOE, LNA, and cEt. In certain embodiments, the alternating modifications are 2′-F and 2′-OMe. Such regions may be contiguous or may be interrupted by differently modified nucleosides or conjugated nucleosides.

[0232] In certain embodiments, the alternating region of alternating modifications each consist of a single nucleoside (i.e., the pattern is (AB)ₓA_{y} wherein A is a nucleoside having a sugar modification of a first type and B is a nucleoside having a sugar modification of a second type; x is 1-20 and y is 0 or 1). In certain embodiments, one or more alternating regions in an alternating motif includes more than a single nucleoside of a type. For example, oligonucleotides may include one or more regions of any of the following nucleoside motifs:

### AABBAA;

### ABBABB;

### AABAAB;

### ABBABAABB;

### ABABAA;

### AABABAB;

### ABABAA;

### ABBAABBABABAA;

### BABBAABBABABAA; or

### ABABBAABBABABAA;

[0233] wherein A is a nucleoside of a first type and B is a nucleoside of a second type. In certain embodiments, A and B are each selected from 2′-F, 2′-OMe, BNA, and MOE.

[0234] In certain embodiments, oligonucleotides having such an alternating motif also comprise a modified 5′ terminal nucleoside, such as those of formula IIc or IIe.

[0235] In certain embodiments, oligonucleotides comprise a region having a 2-2-3 motif. Such regions comprises the following motif:

-(A)₂-(B)ₓ-(A)₂-(C)_{y}(A)₃-

[0236] wherein: A is a first type of modified nucleoside;

[0237] B and C, are nucleosides that are differently modified than A, however, B and C may have the same or different modifications as one another;

[0238] x and y are from 1 to 15.

[0239] In certain embodiments, A is a 2′-OMe modified nucleoside. In certain embodiments, B and C are both 2′-F modified nucleosides. In certain embodiments, A is a 2′-OMe modified nucleoside and B and C are both 2′-F modified nucleosides.

[0240] In certain embodiments, oligonucleosides have the following sugar motif:

5′-(Q)-(AB)ₓA_{y}-(D)_{z}

wherein:

[0241] Q is a nucleoside comprising a stabilized phosphate moiety. In certain embodiments, Q is a nucleoside having Formula IIc or IIe;

[0242] A is a first type of modified nucleoside;

[0243] B is a second type of modified nucleoside;

[0244] D is a modified nucleoside comprising a modification different from the nucleoside adjacent to it. Thus, if y is 0, then D must be differently modified than B and if y is 1, then D must be differently modified than A. In certain embodiments, D differs from both A and B.

[0245] X is 5-15;

[0246] Y is 0 or 1;

[0247] Z is 0-4.

[0248] In certain embodiments, oligonucleosides have the following sugar motif:

5′-(Q)-(A)ₓ-(D)_{z}

wherein:

[0249] Q is a nucleoside comprising a stabilized phosphate moiety. In certain embodiments, Q is a nucleoside having Formula IIc or IIe;

[0250] A is a first type of modified nucleoside;

[0251] D is a modified nucleoside comprising a modification different from A.

[0252] X is 11-30;

[0253] Z is 0-4.

[0254] In certain embodiments A, B, C, and D in the above motifs are selected from: 2′-OMe, 2′-F, 2′-MOE, LNA, and cEt. In certain embodiments, D represents terminal nucleosides. In certain embodiments, such terminal nucleosides are not designed to hybridize to the target nucleic acid (though one or more might hybridize by chance). In certain embodiments, the nucleobase of each D nucleoside is adenine, regardless of the identity of the nucleobase at the corresponding position of the target nucleic acid. In certain embodiments the nucleobase of each D nucleoside is thymine.

[0255] In certain embodiments, antisense compounds, including those particularly suited for use as ssRNA comprise modified internucleoside linkages arranged along the oligonucleotide or region thereof in a defined pattern or modified internucleoside linkage motif. In certain embodiments, oligonucleotides comprise a region having an alternating internucleoside linkage motif. In certain embodiments, oligonucleotides comprise a region of uniformly modified internucleoside linkages. In certain such embodiments, the oligonucleotide comprises a region that is uniformly linked by phosphorothioate internucleoside linkages. In certain embodiments, the oligonucleotide is uniformly linked by phosphorothioate internucleoside linkages. In certain embodiments, each internucleoside linkage of the oligonucleotide is selected from phosphodiester and phosphorothioate. In certain embodiments, each internucleoside linkage of the oligonucleotide is selected from phosphodiester and phosphorothioate and at least one internucleoside linkage is phosphorothioate.

[0256] In certain embodiments, the oligonucleotide comprises at least 6 phosphorothioate internucleoside linkages. In certain embodiments, the oligonucleotide comprises at least 8 phosphorothioate internucleoside linkages. In certain embodiments, the oligonucleotide comprises at least 10 phosphorothioate internucleoside linkages. In certain embodiments, the oligonucleotide comprises at least one block of at least 6 consecutive phosphorothioate internucleoside linkages. In certain embodiments, the oligonucleotide comprises at least one block of at least 8 consecutive phosphorothioate internucleoside linkages. In certain embodiments, the oligonucleotide comprises at least one block of at least 10 consecutive phosphorothioate internucleoside linkages. In certain embodiments, the oligonucleotide comprises at least one block of at least one 12 consecutive phosphorothioate internucleoside linkages. In certain such embodiments, at least one such block is located at the 3′ end of the oligonucleotide. In certain such embodiments, at least one such block is located within 3 nucleosides of the 3′ end of the oligonucleotide.

[0257] Oligonucleotides having any of the various sugar motifs described herein, may have any linkage motif. For example, the oligonucleotides, including but not limited to those described above, may have a linkage motif selected from non-limiting the table below:

| 5′ most linkage | Central region | 3′-region |
|---|---|---|
| PS | Alternating PO/PS | 6 PS |
| PS | Alternating PO/PS | 7 PS |
| PS | Alternating PO/PS | 8 PS |

[0258] ii. siRNA Compounds

[0259] In certain embodiments, antisense compounds are double-stranded RNAi compounds (siRNA). In such embodiments, one or both strands may comprise any modification motif described above for ssRNA. In certain embodiments, ssRNA compounds may be unmodified RNA. In certain embodiments, siRNA compounds may comprise unmodified RNA nucleosides, but modified internucleoside linkages.

[0260] Several embodiments relate to double-stranded compositions wherein each strand comprises a motif defined by the location of one or more modified or unmodified nucleosides. In certain embodiments, compositions are provided comprising a first and a second oligomeric compound that are fully or at least partially hybridized to form a duplex region and further comprising a region that is complementary to and hybridizes to a nucleic acid target. It is suitable that such a composition comprise a first oligomeric compound that is an antisense strand having full or partial complementarity to a nucleic acid target and a second oligomeric compound that is a sense strand having one or more regions of complementarity to and forming at least one duplex region with the first oligomeric compound.

[0261] The compositions of several embodiments modulate gene expression by hybridizing to a nucleic acid target resulting in loss of its normal function. In some embodiments, the target nucleic acid is GHR. In certain embodiment, the degradation of the targeted GHR is facilitated by an activated RISC complex that is formed with compositions of the invention.

[0262] Several embodiments are directed to double-stranded compositions wherein one of the strands is useful in, for example, influencing the preferential loading of the opposite strand into the RISC (or cleavage) complex. The compositions are useful for targeting selected nucleic acid molecules and modulating the expression of one or more genes. In some embodiments, the compositions of the present invention hybridize to a portion of a target RNA resulting in loss of normal function of the target RNA.

[0263] Certain embodiments are drawn to double-stranded compositions wherein both the strands comprises a hemimer motif, a fully modified motif, a positionally modified motif or an alternating motif. Each strand of the compositions of the present invention can be modified to fulfil a particular role in for example the siRNA pathway. Using a different motif in each strand or the same motif with different chemical modifications in each strand permits targeting the antisense strand for the RISC complex while inhibiting the incorporation of the sense strand. Within this model, each strand can be independently modified such that it is enhanced for its particular role. The antisense strand can be modified at the 5′-end to enhance its role in one region of the RISC while the 3′-end can be modified differentially to enhance its role in a different region of the RISC.

[0264] The double-stranded oligonucleotide molecules can be a double-stranded polynucleotide molecule comprising self-complementary sense and antisense regions, wherein the antisense region comprises nucleotide sequence that is complementary to nucleotide sequence in a target nucleic acid molecule or a portion thereof and the sense region having nucleotide sequence corresponding to the target nucleic acid sequence or a portion thereof. The double-stranded oligonucleotide molecules can be assembled from two separate oligonucleotides, where one strand is the sense strand and the other is the antisense strand, wherein the antisense and sense strands are self-complementary (i.e. each strand comprises nucleotide sequence that is complementary to nucleotide sequence in the other strand; such as where the antisense strand and sense strand form a duplex or double-stranded structure, for example wherein the double-stranded region is about 15 to about 30, e.g., about 15, 16, 17, 18, 19, 20, 21, 22, 23, 24, 25, 26, 27, 28, 29 or 30 base pairs; the antisense strand comprises nucleotide sequence that is complementary to nucleotide sequence in a target nucleic acid molecule or a portion thereof and the sense strand comprises nucleotide sequence corresponding to the target nucleic acid sequence or a portion thereof (e.g., about 15 to about 25 or more nucleotides of the double-stranded oligonucleotide molecule are complementary to the target nucleic acid or a portion thereof). Alternatively, the double-stranded oligonucleotide is assembled from a single oligonucleotide, where the self-complementary sense and antisense regions of the siRNA are linked by means of a nucleic acid based or non-nucleic acid-based linker(s).

[0265] The double-stranded oligonucleotide can be a polynucleotide with a duplex, asymmetric duplex, hairpin or asymmetric hairpin secondary structure, having self-complementary sense and antisense regions, wherein the antisense region comprises nucleotide sequence that is complementary to nucleotide sequence in a separate target nucleic acid molecule or a portion thereof and the sense region having nucleotide sequence corresponding to the target nucleic acid sequence or a portion thereof. The double-stranded oligonucleotide can be a circular single-stranded polynucleotide having two or more loop structures and a stem comprising self-complementary sense and antisense regions, wherein the antisense region comprises nucleotide sequence that is complementary to nucleotide sequence in a target nucleic acid molecule or a portion thereof and the sense region having nucleotide sequence corresponding to the target nucleic acid sequence or a portion thereof, and wherein the circular polynucleotide can be processed either in vivo or in vitro to generate an active siRNA molecule capable of mediating RNAi.

[0266] In certain embodiments, the double-stranded oligonucleotide comprises separate sense and antisense sequences or regions, wherein the sense and antisense regions are covalently linked by nucleotide or non-nucleotide linkers molecules as is known in the art, or are alternately non-covalently linked by ionic interactions, hydrogen bonding, van der waals interactions, hydrophobic interactions, and/or stacking interactions. In certain embodiments, the double-stranded oligonucleotide comprises nucleotide sequence that is complementary to nucleotide sequence of a target gene. In another embodiment, the double-stranded oligonucleotide interacts with nucleotide sequence of a target gene in a manner that causes inhibition of expression of the target gene.

[0267] As used herein, double-stranded oligonucleotides need not be limited to those molecules containing only RNA, but further encompasses chemically modified nucleotides and non-nucleotides. In certain embodiments, the short interfering nucleic acid molecules lack 2′-hydroxy (2′-OH) containing nucleotides. In certain embodiments short interfering nucleic acids optionally do not include any ribonucleotides (e.g., nucleotides having a 2′—OH group). Such double-stranded oligonucleotides that do not require the presence of ribonucleotides within the molecule to support RNAi can however have an attached linker or linkers or other attached or associated groups, moieties, or chains containing one or more nucleotides with 2′—OH groups. Optionally, double-stranded oligonucleotides can comprise ribonucleotides at about 5, 10, 20, 30, 40, or 50% of the nucleotide positions. As used herein, the term siRNA is meant to be equivalent to other terms used to describe nucleic acid molecules that are capable of mediating sequence specific RNAi, for example short interfering RNA (siRNA), double-stranded RNA (dsRNA), micro-RNA (miRNA), short hairpin RNA (shRNA), short interfering oligonucleotide, short interfering nucleic acid, short interfering modified oligonucleotide, chemically modified siRNA, post-transcriptional gene silencing RNA (ptgsRNA), and others. In addition, as used herein, the term RNAi is meant to be equivalent to other terms used to describe sequence specific RNA interference, such as post transcriptional gene silencing, translational inhibition, or epigenetics. For example, double-stranded oligonucleotides can be used to epigenetically silence genes at both the post-transcriptional level and the pre-transcriptional level. In a non-limiting example, epigenetic regulation of gene expression by siRNA molecules of the invention can result from siRNA mediated modification of chromatin structure or methylation pattern to alter gene expression (see, for example, Verdel et al., 2004, Science, 303, 672-676; Pal-Bhadra et al., 2004, Science, 303, 669-672; Allshire, 2002, Science, 297, 1818-1819; Volpe et al., 2002, Science, 297, 1833-1837; Jenuwein, 2002, Science, 297, 2215-2218; and Hall et al., 2002, Science, 297, 2232-2237).

[0268] It is contemplated that compounds and compositions of several embodiments provided herein can target GHR by a dsRNA-mediated gene silencing or RNAi mechanism, including, e.g., “hairpin” or stem-loop double-stranded RNA effector molecules in which a single RNA strand with self-complementary sequences is capable of assuming a double-stranded conformation, or duplex dsRNA effector molecules comprising two separate strands of RNA. In various embodiments, the dsRNA consists entirely of ribonucleotides or consists of a mixture of ribonucleotides and deoxynucleotides, such as the RNA/DNA hybrids disclosed, for example, by WO 00/63364, filed Apr. 19, 2000, or U.S. Ser. No. 60/130,377, filed Apr. 21, 1999. The dsRNA or dsRNA effector molecule may be a single molecule with a region of self-complementarity such that nucleotides in one segment of the molecule base pair with nucleotides in another segment of the molecule. In various embodiments, a dsRNA that consists of a single molecule consists entirely of ribonucleotides or includes a region of ribonucleotides that is complementary to a region of deoxyribonucleotides. Alternatively, the dsRNA may include two different strands that have a region of complementarity to each other.

[0269] In various embodiments, both strands consist entirely of ribonucleotides, one strand consists entirely of ribonucleotides and one strand consists entirely of deoxyribonucleotides, or one or both strands contain a mixture of ribonucleotides and deoxyribonucleotides. In certain embodiments, the regions of complementarity are at least 70, 80, 90, 95, 98, or 100% complementary to each other and to a target nucleic acid sequence. In certain embodiments, the region of the dsRNA that is present in a double-stranded conformation includes at least 19, 20, 21, 22, 23, 24, 25, 26, 27, 28, 29, 30, 50, 75, 100, 200, 500, 1000, 2000 or 5000 nucleotides or includes all of the nucleotides in a cDNA or other target nucleic acid sequence being represented in the dsRNA. In some embodiments, the dsRNA does not contain any single stranded regions, such as single stranded ends, or the dsRNA is a hairpin. In other embodiments, the dsRNA has one or more single stranded regions or overhangs. In certain embodiments, RNA/DNA hybrids include a DNA strand or region that is an antisense strand or region (e.g, has at least 70, 80, 90, 95, 98, or 100% complementarity to a target nucleic acid) and an RNA strand or region that is a sense strand or region (e.g, has at least 70, 80, 90, 95, 98, or 100% identity to a target nucleic acid), and vice versa.

[0270] In various embodiments, the RNA/DNA hybrid is made in vitro using enzymatic or chemical synthetic methods such as those described herein or those described in WO 00/63364, filed Apr. 19, 2000, or U.S. Ser. No. 60/130,377, filed Apr. 21, 1999. In other embodiments, a DNA strand synthesized in vitro is complexed with an RNA strand made in vivo or in vitro before, after, or concurrent with the transformation of the DNA strand into the cell. In yet other embodiments, the dsRNA is a single circular nucleic acid containing a sense and an antisense region, or the dsRNA includes a circular nucleic acid and either a second circular nucleic acid or a linear nucleic acid (see, for example, WO 00/63364, filed Apr. 19, 2000, or U.S. Ser. No. 60/130,377, filed Apr. 21, 1999.) Exemplary circular nucleic acids include lariat structures in which the free 5′ phosphoryl group of a nucleotide becomes linked to the 2′ hydroxyl group of another nucleotide in a loop back fashion.

[0271] In other embodiments, the dsRNA includes one or more modified nucleotides in which the 2′ position in the sugar contains a halogen (such as fluorine group) or contains an alkoxy group (such as a methoxy group) which increases the half-life of the dsRNA in vitro or in vivo compared to the corresponding dsRNA in which the corresponding 2′ position contains a hydrogen or an hydroxyl group. In yet other embodiments, the dsRNA includes one or more linkages between adjacent nucleotides other than a naturally-occurring phosphodiester linkage. Examples of such linkages include phosphoramide, phosphorothioate, and phosphorodithioate linkages. The dsRNAs may also be chemically modified nucleic acid molecules as taught in U.S. Pat. No. 6,673,661. In other embodiments, the dsRNA contains one or two capped strands, as disclosed, for example, by WO 00/63364, filed Apr. 19, 2000, or U.S. Ser. No. 60/130,377, filed Apr. 21, 1999.

[0272] In other embodiments, the dsRNA can be any of the at least partially dsRNA molecules disclosed in WO 00/63364, as well as any of the dsRNA molecules described in U.S. Provisional Application 60/399,998; and U.S. Provisional Application 60/419,532, and PCT/US2003/033466, the teaching of which is hereby incorporated by reference. Any of the dsRNAs may be expressed in vitro or in vivo using the methods described herein or standard methods, such as those described in WO 00/63364.

### Occupancy

[0273] In certain embodiments, antisense compounds are not expected to result in cleavage or the target nucleic acid via RNase H or to result in cleavage or sequestration through the RISC pathway. In certain such embodiments, antisense activity may result from occupancy, wherein the presence of the hybridized antisense compound disrupts the activity of the target nucleic acid. In certain such embodiments, the antisense compound may be uniformly modified or may comprise a mix of modifications and/or modified and unmodified nucleosides.

### Target Nucleic Acids, Target Regions and Nucleotide Sequences

[0274] Nucleotide sequences that encode growth hormone receptor (GHR) targetable with the compounds provided herein include, without limitation, the following: GENBANK Accession No. NM_000163.4 (incorporated herein as SEQ ID NO: 1), GENBANK Accession No. NT_006576.16 truncated from nucleotides 42411001 to 42714000 (incorporated herein as SEQ ID NO: 2), GENBANK Accession No X06562.1 (incorporated herein as SEQ ID NO: 3), GENBANK Accession No. DR006395.1 (incorporated herein as SEQ ID NO: 4), GENBANK Accession No. DB052048.1 (incorporated herein as SEQ ID NO: 5), GENBANK Accession No. AF230800.1 (incorporated herein as SEQ ID NO: 6), the complement of GENBANK Accession No. AA398260.1 (incorporated herein as SEQ ID NO: 7), GENBANK Accession No. BC136496.1 (incorporated herein as SEQ ID NO: 8), GENBANK Accession No. NM_001242399.2 (incorporated herein as SEQ ID NO: 9), GENBANK Accession No. NM_001242400.2 (incorporated herein as SEQ ID NO: 10), GENBANK Accession No. NM_001242401.3 (incorporated herein as SEQ ID NO: 11), GENBANK Accession No. NM_001242402.2 (incorporated herein as SEQ ID NO: 12), GENBANK Accession No. NM_001242403.2 (incorporated herein as SEQ ID NO: 13), GENBANK Accession No. NM_001242404.2 (incorporated herein as SEQ ID NO: 14), GENBANK Accession No. NM_001242405.2 (incorporated herein as SEQ ID NO: 15), GENBANK Accession No. NM_001242406.2 (incorporated herein as SEQ ID NO: 16), GENBANK Accession No. NM_001242460.1 (incorporated herein as SEQ ID NO: 17), GENBANK Accession NM_001242461.1 (incorporated herein as SEQ ID NO: 18), GENBANK Accession No. NM_001242462.1 (incorporated herein as SEQ ID NO: 19), or GENBANK Accession No NW_001120958.1 truncated from nucleotides 4410000 to U.S. Pat. No. 4,720,000 (incorporated herein as SEQ ID NO: 2296).

### Hybridization

[0275] In some embodiments, hybridization occurs between an antisense compound disclosed herein and a GHR nucleic acid. The most common mechanism of hybridization involves hydrogen bonding (e.g., Watson-Crick, Hoogsteen or reversed Hoogsteen hydrogen bonding) between complementary nucleobases of the nucleic acid molecules.

[0276] Hybridization can occur under varying conditions. Stringent conditions are sequence-dependent and are determined by the nature and composition of the nucleic acid molecules to be hybridized.

[0277] Methods of determining whether a sequence is specifically hybridizable to a target nucleic acid are well known in the art. In certain embodiments, the antisense compounds provided herein are specifically hybridizable with a GHR nucleic acid.

### Complementarity

[0278] An antisense compound and a target nucleic acid are complementary to each other when a sufficient number of nucleobases of the antisense compound can hydrogen bond with the corresponding nucleobases of the target nucleic acid, such that a desired effect will occur (e.g., antisense inhibition of a target nucleic acid, such as a GHR nucleic acid).

[0279] Non-complementary nucleobases between an antisense compound and a GHR nucleic acid may be tolerated provided that the antisense compound remains able to specifically hybridize to a target nucleic acid. Moreover, an antisense compound may hybridize over one or more segments of a GHR nucleic acid such that intervening or adjacent segments are not involved in the hybridization event (e.g., a loop structure, mismatch or hairpin structure).

[0280] In certain embodiments, the antisense compounds provided herein, or a specified portion thereof, are, or are at least, 70%, 80%, 85%, 86%, 87%, 88%, 89%, 90%, 91%, 92%, 93%, 94%, 95%, 96%, 97%, 98%, 99%, or 100% complementary to a GHR nucleic acid, a target region, target segment, or specified portion thereof. Percent complementarity of an antisense compound with a target nucleic acid can be determined using routine methods.

[0281] For example, an antisense compound in which 18 of 20 nucleobases of the antisense compound are complementary to a target region, and would therefore specifically hybridize, would represent 90 percent complementarity. In this example, the remaining noncomplementary nucleobases may be clustered or interspersed with complementary nucleobases and need not be contiguous to each other or to complementary nucleobases. As such, an antisense compound which is 18 nucleobases in length having four noncomplementary nucleobases which are flanked by two regions of complete complementarity with the target nucleic acid would have 77.8% overall complementarity with the target nucleic acid and would thus fall within the scope of the present invention. Percent complementarity of an antisense compound with a region of a target nucleic acid can be determined routinely using BLAST programs (basic local alignment search tools) and PowerBLAST programs known in the art (Altschul et al., J. Mol. Biol., 1990, 215, 403 410; Zhang and Madden, Genome Res., 1997, 7, 649 656). Percent homology, sequence identity or complementarity, can be determined by, for example, the Gap program (Wisconsin Sequence Analysis Package, Version 8 for Unix, Genetics Computer Group, University Research Park, Madison Wis.), using default settings, which uses the algorithm of Smith and Waterman (Adv. Appl. Math., 1981, 2, 482 489).

[0282] In certain embodiments, the antisense compounds provided herein, or specified portions thereof, are fully complementary (i.e. 100% complementary) to a target nucleic acid, or specified portion thereof. For example, an antisense compound may be fully complementary to a GHR nucleic acid, or a target region, or a target segment or target sequence thereof. As used herein, “fully complementary” means each nucleobase of an antisense compound is capable of precise base pairing with the corresponding nucleobases of a target nucleic acid. For example, a 20 nucleobase antisense compound is fully complementary to a target sequence that is 400 nucleobases long, so long as there is a corresponding 20 nucleobase portion of the target nucleic acid that is fully complementary to the antisense compound. Fully complementary can also be used in reference to a specified portion of the first and/or the second nucleic acid. For example, a 20 nucleobase portion of a 30 nucleobase antisense compound can be “fully complementary” to a target sequence that is 400 nucleobases long. The 20 nucleobase portion of the 30 nucleobase oligonucleotide is fully complementary to the target sequence if the target sequence has a corresponding 20 nucleobase portion wherein each nucleobase is complementary to the 20 nucleobase portion of the antisense compound. At the same time, the entire 30 nucleobase antisense compound may or may not be fully complementary to the target sequence, depending on whether the remaining 10 nucleobases of the antisense compound are also complementary to the target sequence.

[0283] The location of a non-complementary nucleobase may be at the 5′ end or 3′ end of the antisense compound. Alternatively, the non-complementary nucleobase or nucleobases may be at an internal position of the antisense compound. When two or more non-complementary nucleobases are present, they may be contiguous (i.e. linked) or non-contiguous. In one embodiment, a non-complementary nucleobase is located in the wing segment of a gapmer antisense oligonucleotide.

[0284] In certain embodiments, antisense compounds that are, or are up to 11, 12, 13, 14, 15, 16, 17, 18, 19, or 20 nucleobases in length comprise no more than 4, no more than 3, no more than 2, or no more than 1 non-complementary nucleobase(s) relative to a target nucleic acid, such as a GHR nucleic acid, or specified portion thereof.

[0285] In certain embodiments, antisense compounds that are, or are up to 11, 12, 13, 14, 15, 16, 17, 18, 19, 20, 21, 22, 23, 24, 25, 26, 27, 28, 29, or 30 nucleobases in length comprise no more than 6, no more than 5, no more than 4, no more than 3, no more than 2, or no more than 1 non-complementary nucleobase(s) relative to a target nucleic acid, such as a GHR nucleic acid, or specified portion thereof.

[0286] The antisense compounds provided also include those which are complementary to a portion of a target nucleic acid. As used herein, “portion” refers to a defined number of contiguous (i.e. linked) nucleobases within a region or segment of a target nucleic acid. A “portion” can also refer to a defined number of contiguous nucleobases of an antisense compound. In certain embodiments, the antisense compounds, are complementary to at least an 8 nucleobase portion of a target segment. In certain embodiments, the antisense compounds are complementary to at least a 9 nucleobase portion of a target segment. In certain embodiments, the antisense compounds are complementary to at least a 10 nucleobase portion of a target segment. In certain embodiments, the antisense compounds are complementary to at least an 11 nucleobase portion of a target segment. In certain embodiments, the antisense compounds are complementary to at least a 12 nucleobase portion of a target segment. In certain embodiments, the antisense compounds are complementary to at least a 13 nucleobase portion of a target segment. In certain embodiments, the antisense compounds are complementary to at least a 14 nucleobase portion of a target segment. In certain embodiments, the antisense compounds are complementary to at least a 15 nucleobase portion of a target segment. Also contemplated are antisense compounds that are complementary to at least a 9, 10, 11, 12, 13, 14, 15, 16, 17, 18, 19, 20, or more nucleobase portion of a target segment, or a range defined by any two of these values.

### Identity

[0287] The antisense compounds provided herein may also have a defined percent identity to a particular nucleotide sequence, SEQ ID NO, or compound represented by a specific Isis number, or portion thereof. As used herein, an antisense compound is identical to the sequence disclosed herein if it has the same nucleobase pairing ability. For example, a RNA which contains uracil in place of thymidine in a disclosed DNA sequence would be considered identical to the DNA sequence since both uracil and thymidine pair with adenine. Shortened and lengthened versions of the antisense compounds described herein as well as compounds having non-identical bases relative to the antisense compounds provided herein also are contemplated. The non-identical bases may be adjacent to each other or dispersed throughout the antisense compound. Percent identity of an antisense compound is calculated according to the number of bases that have identical base pairing relative to the sequence to which it is being compared.

[0288] In certain embodiments, the antisense compounds, or portions thereof, are, or are at least, 70%, 75%, 80%, 85%, 90%, 95%, 96%, 97%, 98%, 99% or 100% identical to one or more of the antisense compounds or SEQ ID NOs, or a portion thereof, disclosed herein.

[0289] In certain embodiments, a portion of the antisense compound is compared to an equal length portion of the target nucleic acid. In certain embodiments, an 8, 9, 10, 11, 12, 13, 14, 15, 16, 17, 18, 19, 20, 21, 22, 23, 24, or 25 nucleobase portion is compared to an equal length portion of the target nucleic acid.

[0290] In certain embodiments, a portion of the antisense oligonucleotide is compared to an equal length portion of the target nucleic acid. In certain embodiments, an 8, 9, 10, 11, 12, 13, 14, 15, 16, 17, 18, 19, 20, 21, 22, 23, 24, or 25 nucleobase portion is compared to an equal length portion of the target nucleic acid.

### Modifications

[0291] A nucleoside is a base-sugar combination. The nucleobase (also known as base) portion of the nucleoside is normally a heterocyclic base moiety. Nucleotides are nucleosides that further include a phosphate group covalently linked to the sugar portion of the nucleoside. For those nucleosides that include a pentofuranosyl sugar, the phosphate group can be linked to the 2′, 3′ or 5′ hydroxyl moiety of the sugar. Oligonucleotides are formed through the covalent linkage of adjacent nucleosides to one another, to form a linear polymeric oligonucleotide. Within the oligonucleotide structure, the phosphate groups are commonly referred to as forming the internucleoside linkages of the oligonucleotide.

[0292] Modifications to antisense compounds encompass substitutions or changes to internucleoside linkages, sugar moieties, or nucleobases. Modified antisense compounds are often preferred over native forms because of desirable properties such as, for example, enhanced cellular uptake, enhanced affinity for nucleic acid target, increased stability in the presence of nucleases, or increased inhibitory activity.

[0293] Chemically modified nucleosides may also be employed to increase the binding affinity of a shortened or truncated antisense oligonucleotide for its target nucleic acid. Consequently, comparable results can often be obtained with shorter antisense compounds that have such chemically modified nucleosides.

### Modified Internucleoside Linkages

[0294] The naturally occurring internucleoside linkage of RNA and DNA is a 3′ to 5′ phosphodiester linkage. Antisense compounds having one or more modified, i.e. non-naturally occurring, internucleoside linkages are often selected over antisense compounds having naturally occurring internucleoside linkages because of desirable properties such as, for example, enhanced cellular uptake, enhanced affinity for target nucleic acids, and increased stability in the presence of nucleases.

[0295] Oligonucleotides having modified internucleoside linkages include internucleoside linkages that retain a phosphorus atom as well as internucleoside linkages that do not have a phosphorus atom. Representative phosphorus containing internucleoside linkages include, but are not limited to, phosphodiesters, phosphotriesters, methylphosphonates, phosphoramidate, and phosphorothioates. Methods of preparation of phosphorous-containing and non-phosphorous-containing linkages are well known.

[0296] In certain embodiments, antisense compounds targeted to a GHR nucleic acid comprise one or more modified internucleoside linkages. In certain embodiments, the modified internucleoside linkages are phosphorothioate linkages. In certain embodiments, each internucleoside linkage of an antisense compound is a phosphorothioate internucleoside linkage.

### Modified Sugar Moieties

[0297] Antisense compounds can optionally contain one or more nucleosides wherein the sugar group has been modified. Such sugar modified nucleosides may impart enhanced nuclease stability, increased binding affinity, or some other beneficial biological property to the antisense compounds. In certain embodiments, nucleosides comprise chemically modified ribofuranose ring moieties. Examples of chemically modified ribofuranose rings include without limitation, addition of substitutent groups (including 5′ and 2′ substituent groups, bridging of non-geminal ring atoms to form bicyclic nucleic acids (BNA), replacement of the ribosyl ring oxygen atom with S, N(R), or C(R₁)(R₂) (R, R₁ and R₂ are each independently H, C₁-C₁₂ alkyl or a protecting group) and combinations thereof. Examples of chemically modified sugars include 2′-F-5′-methyl substituted nucleoside (see PCT International Application WO 2008/101157 Published on Aug. 21, 2008 for other disclosed 5′,2′-bis substituted nucleosides) or replacement of the ribosyl ring oxygen atom with S with further substitution at the 2′-position (see published U.S. Patent Application US2005-0130923, published on Jun. 16, 2005) or alternatively 5′-substitution of a BNA (see PCT International Application WO 2007/134181 Published on Nov. 22, 2007 wherein LNA is substituted with for example a 5′-methyl or a 5′-vinyl group).

[0298] Examples of nucleosides having modified sugar moieties include without limitation nucleosides comprising 5′-vinyl, 5′-methyl (R or S), 4′-S, 2′-F, 2′-OCH₃, 2′-OCH₂CH₃, 2′-OCH₂CH₂F and 2′-O(CH₂)₂OCH₃ substituent groups. The substituent at the 2′ position can also be selected from allyl, amino, azido, thio, O-allyl, O—C₁-C₁₀ alkyl, OCF₃, OCH₂F, O(CH₂)₂SCH₃, O(CH₂)₂—O—N(Rₘ)(Rₙ), O—CH₂—C(═O)—N(Rₘ)(Rₙ), and O—CH₂—C(═O)—N(R₁)—(CH₂)₂—N(Rₘ)(Rₙ), where each R₁, Rₘ and Rₙ is, independently, H or substituted or unsubstituted C₁-C₁₀ alkyl.

[0299] As used herein, “bicyclic nucleosides” refer to modified nucleosides comprising a bicyclic sugar moiety. Examples of bicyclic nucleosides include without limitation nucleosides comprising a bridge between the 4′ and the 2′ ribosyl ring atoms. In certain embodiments, antisense compounds provided herein include one or more bicyclic nucleosides comprising a 4′ to 2′ bridge. Examples of such 4′ to 2′ bridged bicyclic nucleosides, include but are not limited to one of the formulae: 4′-(CH₂)—O-2′ (LNA); 4′-(CH₂)—S-2; 4′-(CH₂)₂—O-2′ (ENA); 4′-CH(CH₃)—O-2′ (also referred to as constrained ethyl or cEt) and 4′-CH(CH₂OCH₃)—O-2′ (and analogs thereof see U.S. Pat. No. 7,399,845, issued on Jul. 15, 2008); 4′-C(CH₃)(CH₃)—O-2′ (and analogs thereof see published International Application WO/2009/006478, published Jan. 8, 2009); 4′-CH₂—N(OCH₃)-2′ (and analogs thereof see published International Application WO/2008/150729, published Dec. 11, 2008); 4′-CH₂—O—N(CH₃)-2′ (see published U.S. Patent Application US2004-0171570, published Sep. 2, 2004); 4′-CH₂—N(R)—O-2′, wherein R is H, C₁-C₁₂ alkyl, or a protecting group (see U.S. Pat. No. 7,427,672, issued on Sep. 23, 2008); 4′-CH₂—C(H)(CH₃)-2′ (see Chattopadhyaya et al., J. Org. Chem., 2009, 74, 118-134); and 4′-CH₂—C(═CH₂)-2′ (and analogs thereof see published International Application WO 2008/154401, published on Dec. 8, 2008).

[0300] Further reports related to bicyclic nucleosides can also be found in published literature (see for example: Singh et al., Chem. Commun., 1998, 4, 455-456; Koshkin et al., Tetrahedron, 1998, 54, 3607-3630; Wahlestedt et al., Proc. Natl. Acad. Sci. U.S.A, 2000, 97, 5633-5638; Kumar et al., Bioorg. Med. Chem. Lett., 1998, 8, 2219-2222; Singh et al., J. Org. Chem., 1998, 63, 10035-10039; Srivastava et al., J. Am. Chem. Soc., 2007, 129(26) 8362-8379; Elayadi et al., Curr. Opinion Invest. Drugs, 2001, 2, 558-561; Braasch et al., Chem. Biol., 2001, 8, 1-7; and Orum et al., Curr. Opinion Mol. Ther., 2001, 3, 239-243; U.S. Pat. Nos. 6,268,490; 6,525,191; 6,670,461; 6,770,748; 6,794,499; 7,034,133; 7,053,207; 7,399,845; 7,547,684; and 7,696,345; U.S. Patent Publication No. US2008-0039618; US2009-0012281; U.S. Patent Ser. No. 60/989,574; 61/026,995; 61/026,998; 61/056,564; 61/086,231; 61/097,787; and 61/099,844; Published PCT International applications WO 1994/014226; WO 2004/106356; WO 2005/021570; WO 2007/134181; WO 2008/150729; WO 2008/154401; and WO 2009/006478. Each of the foregoing bicyclic nucleosides can be prepared having one or more stereochemical sugar configurations including for example α-L-ribofuranose and β-D-ribofuranose (see PCT international application PCT/DK98/00393, published on Mar. 25, 1999 as WO 99/14226).

[0301] In certain embodiments, bicyclic sugar moieties of BNA nucleosides include, but are not limited to, compounds having at least one bridge between the 4′ and the 2′ position of the pentofuranosyl sugar moiety wherein such bridges independently comprises 1 or from 2 to 4 linked groups independently selected from —[C(Rₐ)(R_{b})]ₙ—, —C(Rₐ)═C(R_{b})—, —C(Rₐ)═N—, —C(═O)—, —C(═NRₐ)—, —C(═S)—, —O—, —Si(Rₐ)₂—, —S(═O)ₓ—, and —N(Rₐ)—;

[0302] wherein:

[0303] x is 0, 1, or 2;

[0304] n is 1, 2, 3, or 4;

[0305] each Rₐ and R_{b} is, independently, H, a protecting group, hydroxyl, C₁-C₁₂ alkyl, substituted C₁-C₁₂ alkyl, C₂-C₁₂ alkenyl, substituted C₂-C₁₂ alkenyl, C₂-C₁₂ alkynyl, substituted C₂-C₁₂ alkynyl, C₅-C₂₀ aryl, substituted C₅-C₂₀ aryl, heterocycle radical, substituted heterocycle radical, heteroaryl, substituted heteroaryl, C₅-C₇ alicyclic radical, substituted C₅-C₇ alicyclic radical, halogen, OJ₁, NJ₁J₂, SJ₁, N₃, COOJ₁, acyl (C(═O)—H), substituted acyl, CN, sulfonyl (S(═O)₂-J₁), or sulfoxyl (S(═O)-J₁); and

[0306] each J₁ and J₂ is, independently, H, C₁-C₁₂ alkyl, substituted C₁-C₁₂ alkyl, C₂-C₁₂ alkenyl, substituted C₁-C₁₂ alkenyl, C₂-C₁₂ alkynyl, substituted C₂-C₁₂ alkynyl, C₅-C₂₀ aryl, substituted C₅-C₂₀ aryl, acyl (C(═O)—H), substituted acyl, a heterocycle radical, a substituted heterocycle radical, C₁-C₁₂ aminoalkyl, substituted C₁-C₁₂ aminoalkyl or a protecting group.

[0307] In certain embodiments, the bridge of a bicyclic sugar moiety is —[C(Rₐ)(R_{b})]ₙ—, —[C(Rₐ)(R_{b})]ₐ—O—, —C(RₐR_{b})—N(R)—O— or —C(RₐR_{b})—O—N(R)—. In certain embodiments, the bridge is 4′-CH₂-2′, 4′-(CH₂)₂-2′, 4′-(CH₂)₃-2′, 4′-CH₂—O-2′, 4′-(CH₂)₂—O-2′, 4′-CH₂—O—N(R)-2′ and 4′-CH₂—N(R)—O-2′- wherein each R is, independently, H, a protecting group or C₁-C₁₂ alkyl.

[0308] In certain embodiments, bicyclic nucleosides are further defined by isomeric configuration. For example, a nucleoside comprising a 4′-2′ methylene-oxy bridge, may be in the α-L configuration or in the 13-D configuration. Previously, α-L-methyleneoxy (4′-CH₂—O-2′) BNA's have been incorporated into antisense oligonucleotides that showed antisense activity (Frieden et al., Nucleic Acids Research, 2003, 21, 6365-6372).

[0309] In certain embodiments, bicyclic nucleosides include, but are not limited to, (A) α-L-methyleneoxy (4′-CH₂—O-2′) BNA, (B) β-D-methyleneoxy (4′-CH₂—O-2′) BNA, (C) ethyleneoxy (4′-(CH₂)₂—O-2′) BNA, (D) aminooxy (4′-CH₂—O—N(R)-2′) BNA, (E) oxyamino (4′-CH₂—N(R)—O-2′) BNA, and (F) methyl(methyleneoxy) (4′-CH(CH₃)—O-2′) BNA, (G) methylene-thio (4′-CH₂—S-2′) BNA, (H) methylene-amino (4′-CH₂—N(R)-2′) BNA, (I) methyl carbocyclic (4′-CH₂—CH(CH₃)-2′) BNA, (J) propylene carbocyclic (4′-(CH₂)₃-2′) BNA and (K) vinyl BNA as depicted below:

[chemical structure]

[chemical structure]

[0310] wherein Bx is the base moiety and R is independently H, a protecting group, C₁-C₁₂ alkyl or C₁-C₁₂ alkoxy.

[0311] In certain embodiments, bicyclic nucleosides are provided having Formula I:

[chemical structure]

wherein:

[0312] Bx is a heterocyclic base moiety;

[0313] -Qₐ-Q_{b}-Q_{c} is —CH₂—N(R_{c})—CH₂—, —C(═O)—N(R_{c})—CH₂—, —CH₂—O—N(R_{c})—, —CH₂—N(R_{c})—O— or —N(R_{c})—O—CH₂;

[0314] R is C₁-C₁₂ alkyl or an amino protecting group; and

[0315] Tₐ and T_{b} are each, independently H, a hydroxyl protecting group, a conjugate group, a reactive phosphorus group, a phosphorus moiety or a covalent attachment to a support medium.

[0316] In certain embodiments, bicyclic nucleosides are provided having Formula II:

[chemical structure]

wherein:

[0317] Bx is a heterocyclic base moiety;

[0318] Tₐ and T_{b} are each, independently H, a hydroxyl protecting group, a conjugate group, a reactive phosphorus group, a phosphorus moiety or a covalent attachment to a support medium;

[0319] Zₐ is C₁-C₆ alkyl, C₂-C₆ alkenyl, C₂-C₆ alkynyl, substituted C₁-C₆ alkyl, substituted C₂-C₆ alkenyl, substituted C₂-C₆ alkynyl, acyl, substituted acyl, substituted amide, thiol or substituted thio.

[0320] In one embodiment, each of the substituted groups is, independently, mono or poly substituted with substituent groups independently selected from halogen, oxo, hydroxyl, OJ_{c}, NJ_{c}J_{d}, SJ_{c}, N₃, OC(═X)J_{c}, and NJₑC(═X)NJ_{c}J_{d}, wherein each J_{c}, J_{d} and Jₑ is, independently, H, C₁-C₆ alkyl, or substituted C₁-C₆ alkyl and X is O or NJ_{c}.

[0321] In certain embodiments, bicyclic nucleosides are provided having Formula III:

[chemical structure]

wherein:

[0322] Bx is a heterocyclic base moiety;

[0323] Tₐ and T_{b} are each, independently H, a hydroxyl protecting group, a conjugate group, a reactive phosphorus group, a phosphorus moiety or a covalent attachment to a support medium;

[0324] Z_{b} is C₁-C₆ alkyl, C₂-C₆ alkenyl, C₂-C₆ alkynyl, substituted C₁-C₆ alkyl, substituted C₂-C₆ alkenyl, substituted C₂-C₆ alkynyl or substituted acyl (C(═O)—).

[0325] In certain embodiments, bicyclic nucleosides are provided having Formula IV:

[chemical structure]

wherein:

[0326] Bx is a heterocyclic base moiety;

[0327] Tₐ and T_{b} are each, independently H, a hydroxyl protecting group, a conjugate group, a reactive phosphorus group, a phosphorus moiety or a covalent attachment to a support medium; R_{d} is C₁-C₆ alkyl, substituted C₁-C₆ alkyl, C₂-C₆ alkenyl, substituted C₂-C₆ alkenyl, C₂-C₆ alkynyl or substituted C₂-C₆ alkynyl;

[0328] each qₐ, q_{b}, q_{c} and q_{d} is, independently, H, halogen, C₁-C₆ alkyl, substituted C₁-C₆ alkyl, C₂-C₆ alkenyl, substituted C₂-C₆ alkenyl, C₂-C₆ alkynyl or substituted C₂-C₆ alkynyl, C₁-C₆ alkoxyl, substituted C₁-C₆ alkoxyl, acyl, substituted acyl, C₁-C₆ aminoalkyl or substituted C₁-C₆ aminoalkyl;

[0329] In certain embodiments, bicyclic nucleosides are provided having Formula V:

[chemical structure]

wherein:

[0330] Bx is a heterocyclic base moiety;

[0331] Tₐ and T_{b} are each, independently H, a hydroxyl protecting group, a conjugate group, a reactive phosphorus group, a phosphorus moiety or a covalent attachment to a support medium;

[0332] qₐ, q_{b}, qₑ and q_{f} are each, independently, hydrogen, halogen, C₁-C₁₂ alkyl, substituted C₁-C₁₂ alkyl, C₂-C₁₂ alkenyl, substituted C₂-C₁₂ alkenyl, C₂-C₁₂ alkynyl, substituted C₂-C₁₂ alkynyl, C₁-C₁₂ alkoxy, substituted C₁-C₁₂ alkoxy, OJⱼ, SJⱼ, SOJⱼ, SO₂Jⱼ, NJⱼJₖ, N₃, CN, C(═O)OJⱼ, C(═O)NJⱼJₖ, C(═O)Jⱼ, O—C(═O)NJⱼJₖ, N(H)C(═NH)NJⱼJₖ, N(H)C(═O)NJⱼJₖ or N(H) C(═S)NJⱼJₖ;

[0333] or qₑ and q_{f} together are ═C(q_{g})(qₕ);

[0334] q_{g} and qₕ are each, independently, H, halogen, C₁-C₁₂ alkyl or substituted C₁-C₁₂ alkyl.

[0335] The synthesis and preparation of the methyleneoxy (4′-CH₂—O-2′) BNA monomers adenine, cytosine, guanine, 5-methyl-cytosine, thymine and uracil, along with their oligomerization, and nucleic acid recognition properties have been described (Koshkin et al., Tetrahedron, 1998, 54, 3607-3630). BNAs and preparation thereof are also described in WO 98/39352 and WO 99/14226.

[0336] Analogs of methyleneoxy (4′-CH₂—O-2′) BNA and 2′-thio-BNAs, have also been prepared (Kumar et al., Bioorg. Med. Chem. Lett., 1998, 8, 2219-2222). Preparation of locked nucleoside analogs comprising oligodeoxyribonucleotide duplexes as substrates for nucleic acid polymerases has also been described (Wengel et al., WO 99/14226). Furthermore, synthesis of 2′-amino-BNA, a novel comformationally restricted high-affinity oligonucleotide analog has been described in the art (Singh et al., J. Org. Chem., 1998, 63, 10035-10039). In addition, 2′-amino- and 2′-methylamino-BNA's have been prepared and the thermal stability of their duplexes with complementary RNA and DNA strands has been previously reported.

[0337] In certain embodiments, bicyclic nucleosides are provided having Formula VI:

[chemical structure]

wherein:

[0338] Bx is a heterocyclic base moiety;

[0339] Tₐ and T_{b} are each, independently H, a hydroxyl protecting group, a conjugate group, a reactive phosphorus group, a phosphorus moiety or a covalent attachment to a support medium;

[0340] each qᵢ, qⱼ, qₖ and qₗ is, independently, H, halogen, C₁-C₁₂ alkyl, substituted C₁-C₁₂ alkyl, C₂-C₁₂ alkenyl, substituted C₂-C₁₂ alkenyl, C₂-C₁₂ alkynyl, substituted C₂-C₁₂ alkynyl, C₁-C₁₂ alkoxyl, substituted C₁-C₁₂ alkoxyl, OJⱼ, SJⱼ, SOJⱼ, SO₂Jⱼ, NJⱼJₖ, N₃, CN, C(═O)OJⱼ, C(═O)NJⱼJₖ, C(═O)Jⱼ, O—C(═O)NJⱼJₖ, N(H)C(═NH)NJⱼJₖ, N(H)C(═O)NJⱼJₖ or N(H)C(═S)NJⱼJₖ; and

[0341] qᵢ and qⱼ or qₗ and qₖ together are ═C(q_{g})(qₕ), wherein q_{g} and qₕ are each, independently, H, halogen, C₁-C₁₂ alkyl or substituted C₁-C₁₂ alkyl.

[0342] One carbocyclic bicyclic nucleoside having a 4′-(CH₂)₃-2′ bridge and the alkenyl analog bridge 4′-CH═CH—CH₂-2′ have been described (Freier et al., Nucleic Acids Research, 1997, 25(22), 4429-4443 and Albaek et al., J. Org. Chem., 2006, 71, 7731-7740). The synthesis and preparation of carbocyclic bicyclic nucleosides along with their oligomerization and biochemical studies have also been described (Srivastava et al., J. Am. Chem. Soc., 2007, 129(26), 8362-8379).

[0343] As used herein, “4′-2′ bicyclic nucleoside” or “4′ to 2′ bicyclic nucleoside” refers to a bicyclic nucleoside comprising a furanose ring comprising a bridge connecting two carbon atoms of the furanose ring connects the 2′ carbon atom and the 4′ carbon atom of the sugar ring.

[0344] As used herein, “monocylic nucleosides” refer to nucleosides comprising modified sugar moieties that are not bicyclic sugar moieties. In certain embodiments, the sugar moiety, or sugar moiety analogue, of a nucleoside may be modified or substituted at any position.

[0345] As used herein, “2′-modified sugar” means a furanosyl sugar modified at the 2′ position. In certain embodiments, such modifications include substituents selected from: a halide, including, but not limited to substituted and unsubstituted alkoxy, substituted and unsubstituted thioalkyl, substituted and unsubstituted amino alkyl, substituted and unsubstituted alkyl, substituted and unsubstituted allyl, and substituted and unsubstituted alkynyl. In certain embodiments, 2′ modifications are selected from substituents including, but not limited to: O[(CH₂)ₙO]ₘCH₃, O(CH₂)ₙNH₂, O(CH₂)ₙCH₃, O(CH₂)ₙF, O(CH₂)ₙONH₂, OCH₂C(═O)N(H)CH₃, and O(CH₂)ₙON[(CH₂)CH₃]2, where n and m are from 1 to about 10. Other 2′-substituent groups can also be selected from: C₁-C₁₂ alkyl, substituted alkyl, alkenyl, alkynyl, alkaryl, aralkyl, O-alkaryl or O-aralkyl, SH, SCH₃, OCN, Cl, Br, CN, F, CF₃, OCF₃, SOCH₃, SO₂CH₃, ONO₂, NO₂, N₃, NH₂, heterocycloalkyl, heterocycloalkaryl, aminoalkylamino, polyalkylamino, substituted silyl, an RNA cleaving group, a reporter group, an intercalator, a group for improving pharmacokinetic properties, or a group for improving the pharmacodynamic properties of an antisense compound, and other substituents having similar properties. In certain embodiments, modified nucleosides comprise a 2′-MOE side chain (Baker et al., J. Biol. Chem., 1997, 272, 11944-12000). Such 2′-MOE substitution have been described as having improved binding affinity compared to unmodified nucleosides and to other modified nucleosides, such as 2′-O-methyl, O-propyl, and O-aminopropyl. Oligonucleotides having the 2′-MOE substituent also have been shown to be antisense inhibitors of gene expression with promising features for in vivo use (Martin, Helv. Chim. Acta, 1995, 78, 486-504; Altmann et al., Chimia, 1996, 50, 168-176; Altmann et al., Biochem. Soc. Trans., 1996, 24, 630-637; and Altmann et al., Nucleosides Nucleotides, 1997, 16, 917-926).

[0346] As used herein, a “modified tetrahydropyran nucleoside” or “modified THP nucleoside” means a nucleoside having a six-membered tetrahydropyran “sugar” substituted in for the pentofuranosyl residue in normal nucleosides (a sugar surrogate). Modified THP nucleosides include, but are not limited to, what is referred to in the art as hexitol nucleic acid (HNA), anitol nucleic acid (ANA), manitol nucleic acid (MNA) (see Leumann, Bioorg. Med. Chem., 2002, 10, 841-854) or fluoro HNA (F-HNA) having a tetrahydropyran ring system as illustrated below:

[chemical structure]

[0347] In certain embodiments, sugar surrogates are selected having Formula VII:

[chemical structure]

wherein independently for each of said at least one tetrahydropyran nucleoside analog of Formula VII:

[0348] Bx is a heterocyclic base moiety;

[0349] Tₐ and T_{b} are each, independently, an internucleoside linking group linking the tetrahydropyran nucleoside analog to the antisense compound or one of Tₐ and T_{b} is an internucleoside linking group linking the tetrahydropyran nucleoside analog to the antisense compound and the other of Tₐ and T_{b} is H, a hydroxyl protecting group, a linked conjugate group or a 5′ or 3′-terminal group;

[0350] q₁, q₂, q₃, q₄, q₅, q₆ and q₇ are each independently, H, C₁-C₆ alkyl, substituted C₁-C₆ alkyl, C₂-C₆ alkenyl, substituted C₂-C₆ alkenyl, C₂-C₆ alkynyl or substituted C₂-C₆ alkynyl; and each of R₁ and R₂ is selected from hydrogen, hydroxyl, halogen, substituted or unsubstituted alkoxy, NJ₁J₂, SJ₁, N₃, OC(═X)J₁, OC(═X)NJ₁J₂, NJ₃C(═X)NJ₁J₂ and CN, wherein X is O, S or NJ₁ and each J₁, J₂ and J₃ is, independently, H or C₁-C₆ alkyl.

[0351] In certain embodiments, the modified THP nucleosides of Formula VII are provided wherein q₁, q₂, q₃, q₄, q₅, q₆ and q₇ are each H. In certain embodiments, at least one of q₁, q₂, q₃, q₄, q₅, q₆ and q₇ is other than H. In certain embodiments, at least one of q₁, q₂, q₃, q₄, q₅, q₆ and q₇ is methyl. In certain embodiments, THP nucleosides of Formula VII are provided wherein one of R₁ and R₂ is fluoro. In certain embodiments, R₁ is fluoro and R₂ is H; R₁ is methoxy and R₂ is H, and R₁ is methoxyethoxy and R₂ is H.

[0352] In certain embodiments, sugar surrogates comprise rings having more than 5 atoms and more than one heteroatom. For example nucleosides comprising morpholino sugar moieties and their use in oligomeric compounds has been reported (see for example: Braasch et al., Biochemistry, 2002, 41, 4503-4510; and U.S. Pat. Nos. 5,698,685; 5,166,315; 5,185,444; and 5,034,506). As used here, the term “morpholino” means a sugar surrogate having the following formula:

[chemical structure]

In certain embodiments, morpholinos may be modified, for example by adding or altering various substituent groups from the above morpholino structure. Such sugar surrogates are referred to herein as “modified morpholinos.”

[0353] Combinations of modifications are also provided without limitation, such as 2′-F-5′-methyl substituted nucleosides (see PCT International Application WO 2008/101157 published on Aug. 21, 2008 for other disclosed 5′, 2′-bis substituted nucleosides) and replacement of the ribosyl ring oxygen atom with S and further substitution at the 2′-position (see published U.S. Patent Application US2005-0130923, published on Jun. 16, 2005) or alternatively 5′-substitution of a bicyclic nucleic acid (see PCT International Application WO 2007/134181, published on Nov. 22, 2007 wherein a 4′-CH₂—O-2′ bicyclic nucleoside is further substituted at the 5′ position with a 5′-methyl or a 5′-vinyl group). The synthesis and preparation of carbocyclic bicyclic nucleosides along with their oligomerization and biochemical studies have also been described (see, e.g., Srivastava et al., J. Am. Chem. Soc. 2007, 129(26), 8362-8379).

[0354] In certain embodiments, antisense compounds comprise one or more modified cyclohexenyl nucleosides, which is a nucleoside having a six-membered cyclohexenyl in place of the pentofuranosyl residue in naturally occurring nucleosides. Modified cyclohexenyl nucleosides include, but are not limited to those described in the art (see for example commonly owned, published PCT Application WO 2010/036696, published on Apr. 10, 2010, Robeyns et al., J. Am. Chem. Soc., 2008, 130(6), 1979-1984; Horvith et al., Tetrahedron Letters, 2007, 48, 3621-3623; Nauwelaerts et al., J. Am. Chem. Soc., 2007, 129(30), 9340-9348; Gu et al., Nucleosides, Nucleotides & Nucleic Acids, 2005, 24(5-7), 993-998; Nauwelaerts et al., Nucleic Acids Research, 2005, 33(8), 2452-2463; Robeyns et al., Acta Crystallographica, Section F. Structural Biology and Crystallization Communications, 2005, F61(6), 585-586; Gu et al., Tetrahedron, 2004, 60(9), 2111-2123; Gu et al., Oligonucleotides, 2003, 13(6), 479-489; Wang et al., J. Org. Chem., 2003, 68, 4499-4505; Verbeure et al., Nucleic Acids Research, 2001, 29(24), 4941-4947; Wang et al., J. Org. Chem., 2001, 66, 8478-82; Wang et al., Nucleosides, Nucleotides & Nucleic Acids, 2001, 20(4-7), 785-788; Wang et al., J. Am. Chem., 2000, 122, 8595-8602; Published PCT application, WO 06/047842; and Published PCT Application WO 01/049687; the text of each is incorporated by reference herein, in their entirety). Certain modified cyclohexenyl nucleosides have Formula X.

[chemical structure]

[0355] wherein independently for each of said at least one cyclohexenyl nucleoside analog of Formula X:

[0356] Bx is a heterocyclic base moiety;

[0357] T₃ and T₄ are each, independently, an internucleoside linking group linking the cyclohexenyl nucleoside analog to an antisense compound or one of T₃ and T₄ is an internucleoside linking group linking the tetrahydropyran nucleoside analog to an antisense compound and the other of T₃ and T₄ is H, a hydroxyl protecting group, a linked conjugate group, or a 5′- or 3′-terminal group; and

[0358] q₁, q₂, q₃, q₄, q₅, q₆, q₇, q₈ and q₉ are each, independently, H, C₁-C₆ alkyl, substituted C₁-C₆ alkyl, C₂-C₆ alkenyl, substituted C₂-C₆ alkenyl, C₂-C₆ alkynyl, substituted C₂-C₆ alkynyl or other sugar substituent group.

[0359] As used herein, “2′-modified” or “2′-substituted” refers to a nucleoside comprising a sugar comprising a substituent at the 2′ position other than H or OH. 2′-modified nucleosides, include, but are not limited to, bicyclic nucleosides wherein the bridge connecting two carbon atoms of the sugar ring connects the 2′ carbon and another carbon of the sugar ring; and nucleosides with non-bridging 2′ substituents, such as allyl, amino, azido, thio, O-allyl, O—C₁-C₁₀ alkyl, —OCF₃, O—(CH₂)2-O—CH₃, 2′-O(CH₂)2SCH₃, O—(CH₂)2-O—N(Rₘ)(Rₙ), or O—CH₂—C(═O)—N(Rₘ)(R), where each Rₘ and Rₙ is, independently, H or substituted or unsubstituted C₁-C₁₀ alkyl. 2′-modified nucleosides may further comprise other modifications, for example at other positions of the sugar and/or at the nucleobase.

[0360] As used herein, “2′-F” refers to a nucleoside comprising a sugar comprising a fluoro group at the 2′ position of the sugar ring.

[0361] As used herein, “2′-OMe” or “2′-OCH₃” or “2′-O-methyl” each refers to a nucleoside comprising a sugar comprising an —OCH₃ group at the 2′ position of the sugar ring.

[0362] As used herein, “MOE” or “2′-MOE” or “2′-OCH₂CH₂OCH₃” or “2′-O-methoxyethyl” each refers to a nucleoside comprising a sugar comprising a —OCH₂CH₂OCH₃ group at the 2′ position of the sugar ring.

[0363] As used herein, “oligonucleotide” refers to a compound comprising a plurality of linked nucleosides.

[0364] In certain embodiments, one or more of the plurality of nucleosides is modified. In certain embodiments, an oligonucleotide comprises one or more ribonucleosides (RNA) and/or deoxyribonucleosides (DNA).

[0365] Many other bicyclo and tricyclo sugar surrogate ring systems are also known in the art that can be used to modify nucleosides for incorporation into antisense compounds (see for example review article: Leumann, Bioorg. Med. Chem., 2002, 10, 841-854). Such ring systems can undergo various additional substitutions to enhance activity.

[0366] Methods for the preparations of modified sugars are well known to those skilled in the art. Some representative U.S. patents that teach the preparation of such modified sugars include without limitation, U.S.: 4,981,957; 5,118,800; 5,319,080; 5,359,044; 5,393,878; 5,446,137; 5,466,786; 5,514,785; 5,519,134; 5,567,811; 5,576,427; 5,591,722; 5,597,909; 5,610,300; 5,627,053; 5,639,873; 5,646,265; 5,670,633; 5,700,920; 5,792,847 and 6,600,032 and International Application PCT/US2005/019219, filed Jun. 2, 2005 and published as WO 2005/121371 on Dec. 22, 2005, and each of which is herein incorporated by reference in its entirety.

[0367] In nucleotides having modified sugar moieties, the nucleobase moieties (natural, modified or a combination thereof) are maintained for hybridization with an appropriate nucleic acid target.

[0368] In certain embodiments, antisense compounds comprise one or more nucleosides having modified sugar moieties. In certain embodiments, the modified sugar moiety is 2′-MOE. In certain embodiments, the 2′-MOE modified nucleosides are arranged in a gapmer motif. In certain embodiments, the modified sugar moiety is a bicyclic nucleoside having a (4′-CH(CH₃)—O-2′) bridging group. In certain embodiments, the (4′-CH(CH₃)—O-2′) modified nucleosides are arranged throughout the wings of a gapmer motif.

### Modified Nucleobases

[0369] Nucleobase (or base) modifications or substitutions are structurally distinguishable from, yet functionally interchangeable with, naturally occurring or synthetic unmodified nucleobases. Both natural and modified nucleobases are capable of participating in hydrogen bonding. Such nucleobase modifications can impart nuclease stability, binding affinity or some other beneficial biological property to antisense compounds. Modified nucleobases include synthetic and natural nucleobases such as, for example, 5-methylcytosine (5-me-C). Certain nucleobase substitutions, including 5-methylcytosine substitutions, are particularly useful for increasing the binding affinity of an antisense compound for a target nucleic acid. For example, 5-methylcytosine substitutions have been shown to increase nucleic acid duplex stability by 0.6-1.2° C. (Sanghvi, Y. S., Crooke, S. T. and Lebleu, B., eds., Antisense Research and Applications, CRC Press, Boca Raton, 1993, pp. 276-278).

[0370] Additional modified nucleobases include 5-hydroxymethyl cytosine, xanthine, hypoxanthine, 2-aminoadenine, 6-methyl and other alkyl derivatives of adenine and guanine, 2-propyl and other alkyl derivatives of adenine and guanine, 2-thiouracil, 2-thiothymine and 2-thiocytosine, 5-halouracil and cytosine, 5-propynyl (—C≡C—CH3) uracil and cytosine and other alkynyl derivatives of pyrimidine bases, 6-azo uracil, cytosine and thymine, 5-uracil (pseudouracil), 4-thiouracil, 8-halo, 8-amino, 8-thiol, 8-thioalkyl, 8-hydroxyl and other 8-substituted adenines and guanines, 5-halo particularly 5-bromo, 5-trifluoromethyl and other 5-substituted uracils and cytosines, 7-methylguanine and 7-methyladenine, 2-F-adenine, 2-amino-adenine, 8-azaguanine and 8-azaadenine, 7-deazaguanine and 7-deazaadenine and 3-deazaguanine and 3-deazaadenine.

[0371] Heterocyclic base moieties can also include those in which the purine or pyrimidine base is replaced with other heterocycles, for example 7-deaza-adenine, 7-deazaguanosine, 2-aminopyridine and 2-pyridone. Nucleobases that are particularly useful for increasing the binding affinity of antisense compounds include 5-substituted pyrimidines, 6-azapyrimidines and N-2, N-6 and O-6 substituted purines, including 2 aminopropyladenine, 5-propynyluracil and 5-propynylcytosine.

[0372] In certain embodiments, antisense compounds targeted to a GHR nucleic acid comprise one or more modified nucleobases. In certain embodiments, shortened or gap-widened antisense oligonucleotides targeted to a GHR nucleic acid comprise one or more modified nucleobases. In certain embodiments, the modified nucleobase is 5-methylcytosine. In certain embodiments, each cytosine is a 5-methylcytosine.

### Conjugated Antisense Compounds

[0373] Antisense compounds may be covalently linked to one or more moieties or conjugates which enhance the activity, cellular distribution or cellular uptake of the resulting antisense oligonucleotides. Typical conjugate groups include cholesterol moieties and lipid moieties. Additional conjugate groups include carbohydrates, phospholipids, biotin, phenazine, folate, phenanthridine, anthraquinone, acridine, fluoresceins, rhodamines, coumarins, and dyes.

[0374] Antisense compounds can also be modified to have one or more stabilizing groups that are generally attached to one or both termini of antisense compounds to enhance properties such as, for example, nuclease stability. Included in stabilizing groups are cap structures. These terminal modifications protect the antisense compound having terminal nucleic acid from exonuclease degradation, and can help in delivery and/or localization within a cell. The cap can be present at the 5′-terminus (5′-cap), or at the 3′-terminus (3′-cap), or can be present on both termini. Cap structures are well known in the art and include, for example, inverted deoxy abasic caps. Further 3′ and 5′-stabilizing groups that can be used to cap one or both ends of an antisense compound to impart nuclease stability include those disclosed in WO 03/004602 published on Jan. 16, 2003.

[0375] In certain embodiments, antisense compounds, including, but not limited to those particularly suited for use as ssRNA, are modified by attachment of one or more conjugate groups. In general, conjugate groups modify one or more properties of the attached oligonucleotide, including but not limited to pharmacodynamics, pharmacokinetics, stability, binding, absorption, cellular distribution, cellular uptake, charge and clearance. Conjugate groups are routinely used in the chemical arts and are linked directly or via an optional conjugate linking moiety or conjugate linking group to a parent compound such as an oligonucleotide. Conjugate groups includes without limitation, intercalators, reporter molecules, polyamines, polyamides, polyethylene glycols, thioethers, polyethers, cholesterols, thiocholesterols, cholic acid moieties, folate, lipids, phospholipids, biotin, phenazine, phenanthridine, anthraquinone, adamantane, acridine, fluoresceins, rhodamines, coumarins and dyes. Certain conjugate groups have been described previously, for example: cholesterol moiety (Letsinger et al., Proc. Natl. Acad. Sci. USA, 1989, 86, 6553-6556), cholic acid (Manoharan et al., Bioorg. Med. Chem. Let., 1994, 4, 1053-1060), a thioether, e.g., hexyl-S-tritylthiol (Manoharan et al., Ann. N.Y. Acad. Sci., 1992, 660, 306-309; Manoharan et al., Bioorg. Med. Chem. Let., 1993, 3, 2765-2770), a thiocholesterol (Oberhauser et al., Nucl. Acids Res., 1992, 20, 533-538), an aliphatic chain, e.g., do-decan-diol or undecyl residues (Saison-Behmoaras et al., EMBO J., 1991, 10, 1111-1118; Kabanov et al., FEBS Left., 1990, 259, 327-330; Svinarchuk et al., Biochimie, 1993, 75, 49-54), a phospholipid, e.g., di-hexadecyl-rac-glycerol or triethyl-ammonium 1,2-di-O-hexadecyl-rac-glycero-3-H-phosphonate (Manoharan et al., Tetrahedron Lett., 1995, 36, 3651-3654; Shea et al., Nucl. Acids Res., 1990, 18, 3777-3783), a polyamine or a polyethylene glycol chain (Manoharan et al., Nucleosides & Nucleotides, 1995, 14, 969-973), or adamantane acetic acid (Manoharan et al., Tetrahedron Lett., 1995, 36, 3651-3654), a palmityl moiety (Mishra et al., Biochim Biophys. Acta, 1995, 1264, 229-237), or an octadecylamine or hexylamino-carbonyl-oxycholesterol moiety (Crooke et al., J. Pharmacol. Exp. Ther., 1996, 277, 923-937).

[0376] For additional conjugates including those useful for ssRNA and their placement within antisense compounds, see e.g., U.S. Application No.; 61/583,963.

### In Vitro Testing of Antisense Oligonucleotides

[0377] Described herein are methods for treatment of cells with antisense oligonucleotides, which can be modified appropriately for treatment with other antisense compounds.

[0378] Cells may be treated with antisense oligonucleotides when the cells reach approximately 60-80% confluency in culture.

[0379] One reagent commonly used to introduce antisense oligonucleotides into cultured cells includes the cationic lipid transfection reagent LIPOFECTIN (Invitrogen, Carlsbad, Calif.). Antisense oligonucleotides may be mixed with LIPOFECTIN in OPTI-MEM 1 (Invitrogen, Carlsbad, Calif.) to achieve the desired final concentration of antisense oligonucleotide and a LIPOFECTIN concentration that may range from 2 to 12 ug/mL per 100 nM antisense oligonucleotide.

[0380] Another reagent used to introduce antisense oligonucleotides into cultured cells includes LIPOFECTAMINE (Invitrogen, Carlsbad, Calif.). Antisense oligonucleotide is mixed with LIPOFECTAMINE in OPTI-MEM 1 reduced serum medium (Invitrogen, Carlsbad, Calif.) to achieve the desired concentration of antisense oligonucleotide and a LIPOFECTAMINE concentration that may range from 2 to 12 ug/mL per 100 nM antisense oligonucleotide.

[0381] Another technique used to introduce antisense oligonucleotides into cultured cells includes electroporation.

[0382] Yet another technique used to introduce antisense oligonucleotides into cultured cells includes free uptake of the oligonucleotides by the cells.

[0383] Cells are treated with antisense oligonucleotides by routine methods. Cells may be harvested 16-24 hours after antisense oligonucleotide treatment, at which time RNA or protein levels of target nucleic acids are measured by methods known in the art and described herein. In general, when treatments are performed in multiple replicates, the data are presented as the average of the replicate treatments.

[0384] The concentration of antisense oligonucleotide used varies from cell line to cell line. Methods to determine the optimal antisense oligonucleotide concentration for a particular cell line are well known in the art. Antisense oligonucleotides are typically used at concentrations ranging from 1 nM to 300 nM when transfected with LIPOFECTAMINE. Antisense oligonucleotides are used at higher concentrations ranging from 625 to 20,000 nM when transfected using electroporation.

### RNA Isolation

[0385] RNA analysis can be performed on total cellular RNA or poly(A)+ mRNA. Methods of RNA isolation are well known in the art. RNA is prepared using methods well known in the art, for example, using the TRIZOL Reagent (Invitrogen, Carlsbad, Calif.) according to the manufacturer's recommended protocols.

### Certain Indications

[0386] Certain embodiments provided herein relate to methods of treating, preventing, or ameliorating a disease associated with excess growth hormone in a subject by administering a GHR specific inhibitor, such as an antisense compound or oligonucleotide targeted to GHR. In certain aspects, the disease associated with excess growth hormone is acromegaly. In certain aspects, the disease associated with excess growth hormone is gigantism.

[0387] Certain embodiments provide a method of treating, preventing, or ameliorating acromegaly in a subject by administering a GHR specific inhibitor, such as an antisense compound or oligonucleotide targeted to GHR. Acromegaly is a disease associated with excess growth hormone (GH). In over 90 percent of acromegaly patients, the overproduction of growth hormones is caused by a benign tumor of the pituitary gland, called an adenoma, which produces excess growth hormone and compresses surrounding brain tissues. Expansion of the adenoma can cause headaches and visual impairment that often accompany acromegaly. In some instances, acromegaly is caused by tumors of the pancreas, lungs, or adrenal glands that lead to an excess of GH, either by producing GH or by producing Growth Hormone Releasing Hormone (GHRH), the hormone that stimulates the pituitary to make GH.

[0388] Acromegaly most commonly affects adults in middle age and can result in severe disfigurement, complicating conditions, and premature death. Because of its pathogenesis and slow progression, acromegaly often goes undiagnosed until changes in external features become noticeable, such as changes in the face. Acromegaly is often associated with gigantism.

[0389] Features of acromegaly include soft tissue swelling resulting in enlargement of the hands, feet, nose, lips and ears, and a general thickening of the skin; soft tissue swelling of internal organs, such as the heart and kidney; vocal cord swelling resulting in a low voice and slow speech; expansion of the skull; pronounced eyebrow protrusion, often with ocular distension; pronounced lower jaw protrusion and enlargement of the tongue; teeth gapping; and carpal tunnel syndrome. In certain embodiments, any one or combination of these features of acromegaly can be treated, prevented, or ameliorated by administering a compound or composition targeted to GHR provided herein.

### EXAMPLES

### Non-Limiting Disclosure and Incorporation by Reference

[0390] While certain compounds, compositions and methods described herein have been described with specificity in accordance with certain embodiments, the following examples serve only to illustrate the compounds described herein and are not intended to limit the same. Each of the references recited in the present application is incorporated herein by reference in its entirety.

### Example 1

### Antisense Inhibition of Human Growth Hormone Receptor in Hep3B Cells by MOE Gapmers

[0391] Antisense oligonucleotides were designed targeting a growth hormone receptor (GHR) nucleic acid and were tested for their effects on GHR mRNA in vitro. The antisense oligonucleotides were tested in a series of experiments that had similar culture conditions. The results for each experiment are presented in separate tables shown below. Cultured Hep3B cells at a density of 20,000 cells per well were transfected using electroporation with 4,500 nM antisense oligonucleotide. After a treatment period of approximately 24 hours, RNA was isolated from the cells and GHR mRNA levels were measured by quantitative real-time PCR. Human primer probe set RTS3437_MGB (forward sequence CGAGTTCAGTGAGGTGCTCTATGT, designated herein as SEQ ID NO: 2297; reverse sequence AAGAGCCATGGAAAGTAGAAATCTTC, designated herein as SEQ ID NO: 2298; probe sequence TTCCTCAGATGAGCCAATT, designated herein as SEQ ID NO: 2299) was used to measure mRNA levels. GHR mRNA levels were adjusted according to total RNA content, as measured by RIBOGREEN®. Results are presented as percent inhibition of GHR, relative to untreated control cells.

[0392] The newly designed chimeric antisense oligonucleotides in the Tables below were designed as 5-10-5 MOE or 3-10-4 MOE gapmers. The 5-10-5 MOE gapmers are 20 nucleosides in length, wherein the central gap segment comprises of ten 2′-deoxynucleosides and is flanked by wing segments on the 5′ direction and the 3′ direction comprising five nucleosides each. The 3-10-4 MOE gapmers are 17 nucleosides in length, wherein the central gap segment comprises of ten 2′-deoxynucleosides and is flanked by wing segments on the 5′ direction and the 3′ direction comprising three and four nucleosides respectively. Each nucleoside in the 5′ wing segment and each nucleoside in the 3′ wing segment has a 2′-MOE modification. The internucleoside linkages throughout each gapmer are phosphorothioate (P═S) linkages. All cytosine residues throughout each gapmer are 5-methylcytosines. “Start site” indicates the 5′-most nucleoside to which the gapmer is targeted in the human gene sequence. “Stop site” indicates the 3′-most nucleoside to which the gapmer is targeted human gene sequence. Each gapmer listed in the Tables below is targeted to either the human GHR mRNA, designated herein as SEQ ID NO: 1 (GENBANK Accession No. NM_000163.4) or the human GHR genomic sequence, designated herein as SEQ ID NO: 2 (GENBANK Accession No. NT_006576.16 truncated from nucleotides 42411001 to 42714000). ‘n/a’ indicates that the antisense oligonucleotide does not target that particular gene sequence with 100% complementarity. In case the sequence alignment for a target gene in a particular table is not shown, it is understood that none of the oligonucleotides presented in that table align with 100% complementarity with that target gene.

TABLE 1
Inhibition of GHR mRNA by 5-10-5 MOE gapmers targeting exonic regions of SEQ ID NO: 1 and 2

| | SEQ | | | | | | | |
|---|---|---|---|---|---|---|---|---|
| | ID | SEQ | | | | SEQ | SEQ | |
| | NO: | ID | | | | ID | ID | |
| | 1 | NO: 1 | | | | NO: 2 | NO: 2 | SEQ |
| | Start | Stop | Target | | % | Start | Stop | ID |
| ISIS NO | Site | Site | Region | Sequence | inhibition | Site | Site | NO |
| 523266 | 164 | 183 | Exon 1 | ACCTCCGAGCTTCGCCTCTG | 64 | 3040 | 3059 | 20 |
| 523267 | 171 | 190 | Exon- | CTGTAGGACCTCCGAGCTTC | 31 | n/a | n/a | 21 |
| | | | exon | | | | | |
| | | | junction | | | | | |
| 523268 | 178 | 197 | Exon- | TCCATACCTGTAGGACCTCC | 37 | n/a | n/a | 22 |
| | | | exon | | | | | |
| | | | junction | | | | | |
| 523271 | 206 | 225 | Exon 2 | TGCCAAGGTCAACAGCAGCT | 80 | 144990 | 145009 | 23 |
| 523272 | 213 | 232 | Exon 2 | CTGCCAGTGCCAAGGTCAAC | 53 | 144997 | 145016 | 24 |
| 523273 | 220 | 239 | Exon 2 | CTTGATCCTGCCAGTGCCAA | 49 | 145004 | 145023 | 25 |
| 523274 | 227 | 246 | Exon 2 | AGCATCACTTGATCCTGCCA | 67 | 145011 | 145030 | 26 |
| 523275 | 234 | 253 | Exon 2 | CAGAAAAAGCATCACTTGAT | 0 | 145018 | 145037 | 27 |
| 523276 | 241 | 260 | Exon 2 | TCACTTCCAGAAAAAGCATC | 1 | 145025 | 145044 | 28 |
| 523284 | 361 | 380 | Exon 4 | GTCTCTCGCTCAGGTGAACG | 48 | 268024 | 268043 | 29 |
| 523285 | 368 | 387 | Exon 4 | TGAAAAAGTCTCTCGCTCAG | 15 | 268031 | 268050 | 30 |
| 523286 | 375 | 394 | Exon 4 | AGTGGCATGAAAAAGTCTCT | 14 | 268038 | 268057 | 31 |
| 523287 | 382 | 401 | Exon 4 | TCTGTCCAGTGGCATGAAAA | 4 | 268045 | 268064 | 32 |
| 523301 | 625 | 644 | Exon 6 | GGATCTGGTTGCACTATTTC | 36 | n/a | n/a | 33 |
| 523302 | 632 | 651 | Exon 6 | AATGGGTGGATCTGGTTGCA | 28 | 278926 | 278945 | 34 |
| 523303 | 647 | 666 | Exon 6 | AGTCCAGTTGAGGGCAATGG | 26 | 278941 | 278960 | 35 |
| 523304 | 654 | 673 | Exon 6 | TCAGTAAAGTCCAGTTGAGG | 0 | 278948 | 278967 | 36 |
| 523305 | 675 | 694 | Exon 6 | GAATCCCAGTTAAACTGACG | 19 | 278969 | 278988 | 37 |
| 523306 | 682 | 701 | Exon 6 | TCTGCATGAATCCCAGTTAA | 39 | 278976 | 278995 | 38 |
| 523309 | 736 | 755 | Exon 6 | ATCCATCCTTTCTGAATATC | 34 | 279030 | 279049 | 39 |
| 523310 | 743 | 762 | Exon 6 | CAGAACCATCCATCCTTTCT | 31 | 279037 | 279056 | 40 |
| 523311 | 750 | 769 | Exon 6 | CATACTCCAGAACCATCCAT | 44 | 279044 | 279063 | 41 |
| 523312 | 757 | 776 | Exon 6 | TGAAGTTCATACTCCAGAAC | 23 | 279051 | 279070 | 42 |
| 523313 | 764 | 783 | Exon 6 | TTTGTATTGAAGTTCATACT | 6 | 279058 | 279077 | 43 |
| 523314 | 771 | 790 | Exon 6 | TTACTTCTTTGTATTGAAGT | 0 | 279065 | 279084 | 44 |
| 523315 | 778 | 797 | Exon 6 | GTTTCATTTACTTCTTTGTA | 3 | 279072 | 279091 | 45 |
| 523316 | 785 | 804 | Exon 6 | CCATTTAGTTTCATTTACTT | 0 | 279079 | 279098 | 46 |
| 523317 | 792 | 811 | Exon 4- | TCATTTTCCATTTAGTTTCA | 19 | n/a | n/a | 47 |
| | | | exon 5 | | | | | |
| | | | junction | | | | | |
| 523323 | 862 | 881 | Exon 7 | ACACGCACTTCATATTCCTT | 63 | 290360 | 290379 | 48 |
| 523324 | 869 | 888 | Exon 7 | GGATCTCACACGCACTTCAT | 80 | 290367 | 290386 | 49 |
| 523328 | 926 | 945 | Exon 7 | AAGTGTTACATAGAGCACCT | 56 | 290424 | 290443 | 50 |
| 523329 | 933 | 952 | Exon 7 | TCTGAGGAAGTGTTACATAG | 53 | 290431 | 290450 | 51 |
| 523330 | 957 | 976 | Exon 7 | CTTCTTCACATGTAAATTGG | 32 | 290455 | 290474 | 52 |
| 523331 | 964 | 983 | Exon 5- | TAGAAATCTTCTTCACATGT | 4 | n/a | n/a | 53 |
| | | | exon 6 | | | | | |
| | | | junction | | | | | |
| 523332 | 971 | 990 | Exon 5- | TGGAAAGTAGAAATCTTCTT | 9 | n/a | n/a | 54 |
| | | | exon 6 | | | | | |
| | | | junction | | | | | |
| 523333 | 978 | 997 | Exon 8 | AGAGCCATGGAAAGTAGAAA | 46 | 292532 | 292551 | 55 |
| 523334 | 985 | 1004 | Exon 8 | ATAATTAAGAGCCATGGAAA | 0 | 292539 | 292558 | 56 |

TABLE 2
Inhibition of GHR mRNA by 5-10-5 MOE gapmers targeting exonic regions of SEQ ID NO: 1 and 2

| | SEQ | SEQ | | | | | | |
|---|---|---|---|---|---|---|---|---|
| | ID | ID | | | | | | |
| | NO: | NO: | | | | SEQ ID | SEQ ID | |
| | 1 | 1 | | | | NO: 2 | NO: 2 | SEQ |
| ISIS | Start | Stop | Target | | % | Start | Stop | ID |
| NO | Site | Site | Region | Sequence | inhibition | Site | Site | NO |
| 523421 | 2072 | 2091 | exon 10 | CAGTTGGTCTGTGCTCACAT | 76 | 298489 | 298508 | 57 |
| 533002 | 207 | 226 | exon 2 | GTGCCAAGGTCAACAGCAGC | 63 | 144991 | 145010 | 58 |
| 533003 | 208 | 227 | exon 2 | AGTGCCAAGGTCAACAGCAG | 62 | 144992 | 145011 | 59 |
| 533004 | 225 | 244 | exon 2 | CATCACTTGATCCTGCCAGT | 53 | 145009 | 145028 | 60 |
| 533005 | 226 | 245 | exon 2 | GCATCACTTGATCCTGCCAG | 80 | 145010 | 145029 | 61 |
| 533006 | 228 | 247 | exon 2 | AAGCATCACTTGATCCTGCC | 75 | 145012 | 145031 | 62 |
| 533007 | 229 | 248 | exon 2 | AAAGCATCACTTGATCCTGC | 61 | 145013 | 145032 | 63 |
| 533019 | 867 | 886 | exon 7 | ATCTCACACGCACTTCATAT | 35 | 290365 | 290384 | 64 |
| 533020 | 868 | 887 | exon 7 | GATCTCACACGCACTTCATA | 47 | 290366 | 290385 | 65 |
| 533021 | 870 | 889 | exon 7 | TGGATCTCACACGCACTTCA | 86 | 290368 | 290387 | 66 |
| 533022 | 871 | 890 | exon 7 | TTGGATCTCACACGCACTTC | 70 | 290369 | 290388 | 67 |
| 533037 | 1360 | 1379 | exon 10 | TCCAGAATGTCAGGTTCACA | 59 | 297777 | 297796 | 68 |
| 533038 | 1361 | 1380 | exon 10 | CTCCAGAATGTCAGGTTCAC | 74 | 297778 | 297797 | 69 |
| 533039 | 1363 | 1382 | exon 10 | GTCTCCAGAATGTCAGGTTC | 45 | 297780 | 297799 | 70 |
| 533040 | 1364 | 1383 | exon 10 | AGTCTCCAGAATGTCAGGTT | 51 | 297781 | 297800 | 71 |
| 533042 | 1525 | 1544 | exon 10 | GCTTGGATAACACTGGGCTG | 41 | 297942 | 297961 | 72 |
| 533043 | 1526 | 1545 | exon 10 | TGCTTGGATAACACTGGGCT | 46 | 297943 | 297962 | 73 |
| 533044 | 1528 | 1547 | exon 10 | TCTGCTTGGATAACACTGGG | 55 | 297945 | 297964 | 74 |
| 533045 | 1529 | 1548 | exon 10 | CTCTGCTTGGATAACACTGG | 47 | 297946 | 297965 | 75 |
| 533046 | 1530 | 1549 | exon 10 | TCTCTGCTTGGATAACACTG | 54 | 297947 | 297966 | 76 |
| 533047 | 1744 | 1763 | exon 10 | CAGAGTGAGACCATTTCCGG | 47 | 298161 | 298180 | 77 |
| 533048 | 1745 | 1764 | exon 10 | GCAGAGTGAGACCATTTCCG | 60 | 298162 | 298181 | 78 |
| 533049 | 1747 | 1766 | exon 10 | TGGCAGAGTGAGACCATTTC | 65 | 298164 | 298183 | 79 |
| 533050 | 1748 | 1767 | exon 10 | TTGGCAGAGTGAGACCATTT | 47 | 298165 | 298184 | 80 |
| 533051 | 1749 | 1768 | exon 10 | CTTGGCAGAGTGAGACCATT | 30 | 298166 | 298185 | 81 |
| 533066 | 2685 | 2704 | exon 10 | CAGTGTGTAGTGTAATATAA | 53 | 299102 | 299121 | 82 |
| 533067 | 2686 | 2705 | exon 10 | ACAGTGTGTAGTGTAATATA | 68 | 299103 | 299122 | 83 |
| 533068 | 2688 | 2707 | exon 10 | ACACAGTGTGTAGTGTAATA | 62 | 299105 | 299124 | 84 |
| 533069 | 2689 | 2708 | exon 10 | TACACAGTGTGTAGTGTAAT | 55 | 299106 | 299125 | 85 |
| 533070 | 2690 | 2709 | exon 10 | GTACACAGTGTGTAGTGTAA | 50 | 299107 | 299126 | 86 |
| 533071 | 3205 | 3224 | exon 10 | TGTACCTTATTCCCTTCCTG | 68 | 299622 | 299641 | 87 |
| 533072 | 3206 | 3225 | exon 10 | TTGTACCTTATTCCCTTCCT | 61 | 299623 | 299642 | 88 |
| 533073 | 3208 | 3227 | exon 10 | TCTTGTACCTTATTCCCTTC | 60 | 299625 | 299644 | 89 |
| 533074 | 3209 | 3228 | exon 10 | TTCTTGTACCTTATTCCCTT | 46 | 299626 | 299645 | 90 |

TABLE 3
Inhibition of GHR mRNA by 5-10-5 MOE gapmers targeting intronic and exonic regions of SEQ ID NO: 1
and 2

| | SEQ | | | | | | | |
|---|---|---|---|---|---|---|---|---|
| | ID | SEQ | | | | SEQ | SEQ | |
| | NO: | ID | | | | ID | ID | |
| | 1 | NO: 1 | | | | NO: 2 | NO: 2 | |
| ISIS | Start | Stop | Target | | % | Start | Stop | SEQ |
| NO | Site | Site | Region | Sequence | inhibition | Site | Site | ID NO |
| 532174 | n/a | n/a | Intron 1 | ACATGTACCCAAACCAACAC | 37 | 18731 | 18750 | 91 |
| 533086 | 3210 | 3229 | Exon 10 | CTTCTTGTACCTTATTCCCT | 72 | 299627 | 299646 | 92 |
| 533087 | 3212 | 3231 | Exon 10 | TGCTTCTTGTACCTTATTCC | 77 | 299629 | 299648 | 93 |
| 533088 | 3213 | 3232 | Exon 10 | ATGCTTCTTGTACCTTATTC | 63 | 299630 | 299649 | 94 |
| 533089 | 3215 | 3234 | Exon 10 | AAATGCTTCTTGTACCTTAT | 67 | 299632 | 299651 | 95 |
| 533090 | 3216 | 3235 | Exon 10 | AAAATGCTTCTTGTACCTTA | 50 | 299633 | 299652 | 96 |
| 533091 | 3217 | 3236 | Exon 10 | CAAAATGCTTCTTGTACCTT | 44 | 299634 | 299653 | 97 |
| 533092 | 3518 | 3537 | Exon 10 | CTTCTGAATGCTTGCTTTGA | 29 | 299935 | 299954 | 98 |
| 533093 | 3519 | 3538 | Exon 10 | TCTTCTGAATGCTTGCTTTG | 47 | 299936 | 299955 | 99 |
| 533094 | 3521 | 3540 | Exon 10 | TTTCTTCTGAATGCTTGCTT | 63 | 299938 | 299957 | 100 |
| 533095 | 3522 | 3541 | Exon 10 | TTTTCTTCTGAATGCTTGCT | 51 | 299939 | 299958 | 101 |
| 533096 | 3523 | 3542 | Exon 10 | TTTTTCTTCTGAATGCTTGC | 34 | 299940 | 299959 | 102 |
| 533097 | 4041 | 4060 | Exon 10 | TGCGATAAATGGGAAATACT | 36 | 300458 | 300477 | 103 |
| 533098 | 4042 | 4061 | Exon 10 | CTGCGATAAATGGGAAATAC | 52 | 300459 | 300478 | 104 |
| 533099 | 4043 | 4062 | Exon 10 | TCTGCGATAAATGGGAAATA | 41 | 300460 | 300479 | 105 |
| 533100 | 4045 | 4064 | Exon 10 | GGTCTGCGATAAATGGGAAA | 40 | 300462 | 300481 | 106 |
| 533101 | 4046 | 4065 | Exon 10 | AGGTCTGCGATAAATGGGAA | 39 | 300463 | 300482 | 107 |
| 533102 | 4048 | 4067 | Exon 10 | AAAGGTCTGCGATAAATGGG | 34 | 300465 | 300484 | 108 |
| 533103 | 4049 | 4068 | Exon 10 | AAAAGGTCTGCGATAAATGG | 35 | 300466 | 300485 | 109 |
| 533104 | 4050 | 4069 | Exon 10 | AAAAAGGTCTGCGATAAATG | 15 | 300467 | 300486 | 110 |
| 533115 | n/a | n/a | Intron 1 | CATGAAGGCCACTCTTCCAA | 63 | 12777 | 12796 | 111 |
| 533116 | n/a | n/a | Intron 1 | CCATGAAGGCCACTCTTCCA | 78 | 12778 | 12797 | 112 |
| 533117 | n/a | n/a | Intron 1 | CCCATGAAGGCCACTCTTCC | 71 | 12779 | 12798 | 113 |
| 533118 | n/a | n/a | Intron 1 | TGCCCATGAAGGCCACTCTT | 66 | 12781 | 12800 | 114 |
| 533119 | n/a | n/a | Intron 1 | TTGCCCATGAAGGCCACTCT | 60 | 12782 | 12801 | 115 |
| 533120 | n/a | n/a | Intron 1 | GTTGCCCATGAAGGCCACTC | 74 | 12783 | 12802 | 116 |
| 533121 | n/a | n/a | Intron 1 | GGTCTTTCATGAATCAAGCT | 79 | 17927 | 17946 | 117 |
| 533122 | n/a | n/a | Intron 1 | TGGTCTTTCATGAATCAAGC | 83 | 17928 | 17947 | 118 |
| 533123 | n/a | n/a | Intron 1 | ATGGTCTTTCATGAATCAAG | 83 | 17929 | 17948 | 119 |
| 533124 | n/a | n/a | Intron 1 | TGATGGTCTTTCATGAATCA | 78 | 17931 | 17950 | 120 |
| 533125 | n/a | n/a | Intron 1 | CTGATGGTCTTTCATGAATC | 82 | 17932 | 17951 | 121 |
| 533126 | n/a | n/a | Intron 1 | GCTGATGGTCTTTCATGAAT | 74 | 17933 | 17952 | 122 |
| 533127 | n/a | n/a | Intron 1 | GTACCCAAACCAACACTAAT | 57 | 18727 | 18746 | 123 |
| 533128 | n/a | n/a | Intron 1 | TGTACCCAAACCAACACTAA | 65 | 18728 | 18747 | 124 |
| 533129 | n/a | n/a | Intron 1 | ATGTACCCAAACCAACACTA | 64 | 18729 | 18748 | 125 |
| 533130 | n/a | n/a | Intron 1 | GACATGTACCCAAACCAACA | 63 | 18732 | 18751 | 126 |
| 533131 | n/a | n/a | Intron 1 | AGACATGTACCCAAACCAAC | 81 | 18733 | 18752 | 127 |
| 533132 | n/a | n/a | Intron 1 | AGGAATGGAAAACCAAATAT | 49 | 26494 | 26513 | 128 |
| 533133 | n/a | n/a | Intron 1 | CAGGAATGGAAAACCAAATA | 74 | 26495 | 26514 | 129 |
| | | | | | | 121986 | 122005 | |
| 533134 | n/a | n/a | Intron 1 | TCAGGAATGGAAAACCAAAT | 73 | 26496 | 26515 | 130 |
| | | | | | | 121987 | 122006 | |
| 533135 | n/a | n/a | Intron 1 | ACTCAGGAATGGAAAACCAA | 77 | 26498 | 26517 | 131 |
| | | | | | | 113032 | 113051 | |
| | | | | | | 121989 | 122008 | |
| 533136 | n/a | n/a | Intron 1 | AACTCAGGAATGGAAAACCA | 79 | 26499 | 26518 | 132 |
| | | | | | | 113033 | 113052 | |
| | | | | | | 121990 | 122009 | |
| 533137 | n/a | n/a | Intron 1 | TAACTCAGGAATGGAAAACC | 67 | 26500 | 26519 | 133 |
| | | | | | | 113034 | 113053 | |
| | | | | | | 121991 | 122010 | |
| 533138 | n/a | n/a | Intron 1 | CAAAATTACTGCAGTCACAG | 67 | 39716 | 39735 | 134 |
| 533139 | n/a | n/a | Intron 1 | ACAAAATTACTGCAGTCACA | 81 | 39717 | 39736 | 135 |
| 533140 | n/a | n/a | Intron 1 | TACAAAATTACTGCAGTCAC | 81 | 39718 | 39737 | 136 |
| 533141 | n/a | n/a | Intron 1 | CATACAAAATTACTGCAGTC | 67 | 39720 | 39739 | 137 |
| 533142 | n/a | n/a | Intron 1 | ACATACAAAATTACTGCAGT | 48 | 39721 | 39740 | 138 |
| 533143 | n/a | n/a | Intron 1 | AACATACAAAATTACTGCAG | 53 | 39722 | 39741 | 139 |
| 533144 | n/a | n/a | Intron 1 | TTTTAGTATGAACCTTAAAA | 0 | 42139 | 42158 | 140 |
| 533145 | n/a | n/a | Intron 1 | CTTTTAGTATGAACCTTAAA | 38 | 42140 | 42159 | 141 |
| 533146 | n/a | n/a | Intron 1 | TCTTTTAGTATGAACCTTAA | 57 | 42141 | 42160 | 142 |
| 533147 | n/a | n/a | Intron 1 | AATCTTTTAGTATGAACCTT | 60 | 42143 | 42162 | 143 |
| 533148 | n/a | n/a | Intron 1 | CAATCTTTTAGTATGAACCT | 70 | 42144 | 42163 | 144 |
| 533149 | n/a | n/a | Intron 1 | ACAATCTTTTAGTATGAACC | 60 | 42145 | 42164 | 145 |
| 533150 | n/a | n/a | Intron 1 | AAGTTATGTGACTCTGAGCA | 67 | 43174 | 43193 | 146 |
| 533151 | n/a | n/a | Intron 1 | CAAGTTATGTGACTCTGAGC | 67 | 43175 | 43194 | 147 |
| 533152 | n/a | n/a | Intron 1 | TCAAGTTATGTGACTCTGAG | 63 | 43176 | 43195 | 148 |
| 533153 | n/a | n/a | Intron 1 | AGTTCTCCATTAGGGTTCTG | 83 | 50948 | 50967 | 149 |
| 533154 | n/a | n/a | Intron 1 | TAGTTCTCCATTAGGGTTCT | 76 | 50949 | 50968 | 150 |
| 533155 | n/a | n/a | Intron 1 | ATAGTTCTCCATTAGGGTTC | 51 | 50950 | 50969 | 151 |
| 533156 | n/a | n/a | Intron 1 | AAGCAGGTTGGCAGACAGAC | 79 | 53467 | 53486 | 152 |
| 533157 | n/a | n/a | Intron 1 | GAAGCAGGTTGGCAGACAGA | 60 | 53468 | 53487 | 153 |
| 533158 | n/a | n/a | Intron 1 | GGAAGCAGGTTGGCAGACAG | 67 | 53469 | 53488 | 154 |
| 533159 | n/a | n/a | Intron 1 | TCTTCTTGTGAGCTGGCTTC | 61 | 64882 | 64901 | 155 |
| 533160 | n/a | n/a | Intron 1 | GTCTTCTTGTGAGCTGGCTT | 83 | 64883 | 64902 | 156 |
| 533161 | n/a | n/a | Intron 1 | AGTCTTCTTGTGAGCTGGCT | 81 | 64884 | 64903 | 157 |

TABLE 4
Inhibition of GHR mRNA by 5-10-5 MOE gapmers targeting intronic and exonic regions of SEQ ID NO: 1
and 2

| | SEQ | SEQ | | | | | | |
|---|---|---|---|---|---|---|---|---|
| | ID | ID | | | | | SEQ | |
| | NO: | NO: | | | | | ID | |
| | 1 | 1 | | | | SEQ ID | NO: 2 | SEQ |
| ISIS | Start | Stop | Target | | % | NO: 2 | Stop | ID |
| NO | Site | Site | Region | Sequence | inhibition | Start Site | Site | NO |
| 533133 | n/a | n/a | Intron 1 | CAGGAATGGAAAACCAAATA | 76 | 26495 | 26514 | 129 |
| | | | | | | 121986 | 122005 | |
| 533134 | n/a | n/a | Intron 1 | TCAGGAATGGAAAACCAAAT | 83 | 26496 | 26515 | 130 |
| | | | | | | 121987 | 122006 | |
| 533174 | n/a | n/a | Intron 1 | TAAGTCTTCTTGTGAGCTGG | 73 | 64886 | 64905 | 158 |
| 533175 | n/a | n/a | Intron 1 | TTAAGTCTTCTTGTGAGCTG | 58 | 64887 | 64906 | 159 |
| 533176 | n/a | n/a | Intron 1 | ATTAAGTCTTCTTGTGAGCT | 51 | 64888 | 64907 | 160 |
| 533177 | n/a | n/a | Intron 1 | TCTCTTCCACTCACATCCAT | 72 | 65989 | 66008 | 161 |
| 533178 | n/a | n/a | Intron 1 | GTCTCTTCCACTCACATCCA | 86 | 65990 | 66009 | 162 |
| 533179 | n/a | n/a | Intron 1 | AGTCTCTTCCACTCACATCC | 80 | 65991 | 66010 | 163 |
| 533180 | n/a | n/a | Intron 1 | TAAGTATTTGTAGCAGTTGC | 31 | 78195 | 78214 | 164 |
| 533181 | n/a | n/a | Intron 1 | CTAAGTATTTGTAGCAGTTG | 14 | 78196 | 78215 | 165 |
| 533182 | n/a | n/a | Intron 1 | GCTAAGTATTTGTAGCAGTT | 59 | 78197 | 78216 | 166 |
| 533183 | n/a | n/a | Intron 1 | TGGCTAAGTATTTGTAGCAG | 34 | 78199 | 78218 | 167 |
| 533184 | n/a | n/a | Intron 1 | TTGGCTAAGTATTTGTAGCA | 18 | 78200 | 78219 | 168 |
| 533185 | n/a | n/a | Intron 1 | TTTGGCTAAGTATTTGTAGC | 21 | 78201 | 78220 | 169 |
| 533186 | n/a | n/a | Intron 1 | AAAATGTCAACAGTGCATAG | 61 | 80636 | 80655 | 170 |
| 533187 | n/a | n/a | Intron 1 | CAAAATGTCAACAGTGCATA | 78 | 80637 | 80656 | 171 |
| 533188 | n/a | n/a | Intron 1 | CCAAAATGTCAACAGTGCAT | 85 | 80638 | 80657 | 172 |
| 533189 | n/a | n/a | Intron 1 | GCCCAAAATGTCAACAGTGC | 82 | 80640 | 80659 | 173 |
| 533190 | n/a | n/a | Intron 1 | GGCCCAAAATGTCAACAGTG | 60 | 80641 | 80660 | 174 |
| 533191 | n/a | n/a | Intron 1 | TGGCCCAAAATGTCAACAGT | 31 | 80642 | 80661 | 175 |
| 533192 | n/a | n/a | Intron 1 | CAGAATCTTCTCTTTGGCCA | 66 | 98624 | 98643 | 176 |
| 533193 | n/a | n/a | Intron 1 | GCAGAATCTTCTCTTTGGCC | 81 | 98625 | 98644 | 177 |
| 533194 | n/a | n/a | Intron 1 | TGCAGAATCTTCTCTTTGGC | 72 | 98626 | 98645 | 178 |
| 533195 | n/a | n/a | Intron 1 | TTTGCAGAATCTTCTCTTTG | 33 | 98628 | 98647 | 179 |
| 533196 | n/a | n/a | Intron 1 | ATTTGCAGAATCTTCTCTTT | 27 | 98629 | 98648 | 180 |
| 533197 | n/a | n/a | Intron 1 | AATTTGCAGAATCTTCTCTT | 38 | 98630 | 98649 | 181 |
| 533198 | n/a | n/a | Intron 1 | ATAAAGCTATGCCATAAAGC | 37 | 99478 | 99497 | 182 |
| 533199 | n/a | n/a | Intron 1 | CATAAAGCTATGCCATAAAG | 14 | 99479 | 99498 | 183 |
| 533200 | n/a | n/a | Intron 1 | CCATAAAGCTATGCCATAAA | 30 | 99480 | 99499 | 184 |
| 533201 | n/a | n/a | Intron 1 | GACCATAAAGCTATGCCATA | 54 | 99482 | 99501 | 185 |
| 533202 | n/a | n/a | Intron 1 | TGACCATAAAGCTATGCCAT | 64 | 99483 | 99502 | 186 |
| 533203 | n/a | n/a | Intron 1 | CTGACCATAAAGCTATGCCA | 61 | 99484 | 99503 | 187 |
| 533204 | n/a | n/a | Intron 1 | CAAAAAGTTGAGCTGAGAAA | 0 | 101078 | 101097 | 188 |
| 533205 | n/a | n/a | Intron 1 | CCAAAAAGTTGAGCTGAGAA | 28 | 101079 | 101098 | 189 |
| 533206 | n/a | n/a | Intron 1 | CCCAAAAAGTTGAGCTGAGA | 52 | 101080 | 101099 | 190 |
| 533207 | n/a | n/a | Intron 1 | CACCCAAAAAGTTGAGCTGA | 60 | 101082 | 101101 | 191 |
| 533208 | n/a | n/a | Intron 1 | ACACCCAAAAAGTTGAGCTG | 34 | 101083 | 101102 | 192 |
| 533209 | n/a | n/a | Intron 1 | TACACCCAAAAAGTTGAGCT | 36 | 101084 | 101103 | 193 |
| 533210 | n/a | n/a | Intron 1 | CTTTTAATGGCACCCAAGCA | 41 | 103566 | 103585 | 194 |
| 533211 | n/a | n/a | Intron 1 | GCTTTTAATGGCACCCAAGC | 54 | 103567 | 103586 | 195 |
| 533212 | n/a | n/a | Intron 1 | TGCTTTTAATGGCACCCAAG | 67 | 103568 | 103587 | 196 |
| 533213 | n/a | n/a | Intron 1 | AATGCTTTTAATGGCACCCA | 73 | 103570 | 103589 | 197 |
| 533214 | n/a | n/a | Intron 1 | AAATGCTTTTAATGGCACCC | 73 | 103571 | 103590 | 198 |
| 533215 | n/a | n/a | Intron 1 | GAAATGCTTTTAATGGCACC | 41 | 103572 | 103591 | 199 |
| 533216 | n/a | n/a | Intron 1 | TAATTCTTAAGGGCCCTCTG | 36 | 106963 | 106982 | 200 |
| 533217 | n/a | n/a | Intron 1 | ATAATTCTTAAGGGCCCTCT | 45 | 106964 | 106983 | 201 |
| 533218 | n/a | n/a | Intron 1 | CATAATTCTTAAGGGCCCTC | 50 | 106965 | 106984 | 202 |
| 533219 | n/a | n/a | Intron 1 | AGCATAATTCTTAAGGGCCC | 48 | 106967 | 106986 | 203 |
| 533220 | n/a | n/a | Intron 1 | TAGCATAATTCTTAAGGGCC | 52 | 106968 | 106987 | 204 |
| 533221 | n/a | n/a | Intron 1 | TTAGCATAATTCTTAAGGGC | 28 | 106969 | 106988 | 205 |
| 533222 | n/a | n/a | Intron 1 | AGGAATGGAAAACCAAACAT | 13 | 113028 | 113047 | 206 |
| 533223 | n/a | n/a | Intron 1 | CAGGAATGGAAAACCAAACA | 64 | 113029 | 113048 | 207 |
| 533224 | n/a | n/a | Intron 1 | TCAGGAATGGAAAACCAAAC | 61 | 113030 | 113049 | 208 |
| 533225 | n/a | n/a | Intron 1 | AGGAATGGAAAACCAAATAC | 18 | 121985 | 122004 | 209 |
| 533226 | n/a | n/a | Intron 1 | CATGACTATGTTCTGGCAAG | 37 | 125591 | 125610 | 210 |
| 533227 | n/a | n/a | Intron 1 | ACATGACTATGTTCTGGCAA | 44 | 125592 | 125611 | 211 |
| 533228 | n/a | n/a | Intron 1 | CACATGACTATGTTCTGGCA | 63 | 125593 | 125612 | 212 |
| 533229 | n/a | n/a | Intron 1 | GTCACATGACTATGTTCTGG | 47 | 125595 | 125614 | 213 |
| 533230 | n/a | n/a | Intron 1 | GGTCACATGACTATGTTCTG | 49 | 125596 | 125615 | 214 |
| 533231 | n/a | n/a | Intron 1 | TGGTCACATGACTATGTTCT | 30 | 125597 | 125616 | 215 |
| 533232 | n/a | n/a | Intron 2 | CTGAATTCTGAGCTCTGGAA | 73 | 145428 | 145447 | 216 |
| 533233 | n/a | n/a | Intron 2 | CCTGAATTCTGAGCTCTGGA | 88 | 145429 | 145448 | 217 |
| 533234 | n/a | n/a | Intron 2 | GCCTGAATTCTGAGCTCTGG | 92 | 145430 | 145449 | 218 |
| 533235 | n/a | n/a | Intron 2 | AAGCCTGAATTCTGAGCTCT | 83 | 145432 | 145451 | 219 |
| 533236 | n/a | n/a | Intron 2 | CAAGCCTGAATTCTGAGCTC | 68 | 145433 | 145452 | 220 |
| 533237 | n/a | n/a | Intron 2 | ACAAGCCTGAATTCTGAGCT | 81 | 145434 | 145453 | 221 |
| 533238 | n/a | n/a | Intron 2 | GGATCTCAGCTGCAATTCTT | 72 | 146235 | 146254 | 222 |
| 533239 | n/a | n/a | Intron 2 | AGGATCTCAGCTGCAATTCT | 53 | 146236 | 146255 | 223 |
| 533240 | n/a | n/a | Intron 2 | GAGGATCTCAGCTGCAATTC | 69 | 146237 | 146256 | 224 |
| 533241 | n/a | n/a | Intron 2 | CAGAGGATCTCAGCTGCAAT | 69 | 146239 | 146258 | 225 |
| 533242 | n/a | n/a | Intron 2 | GCAGAGGATCTCAGCTGCAA | 76 | 146240 | 146259 | 226 |
| 533243 | 230 | 249 | Exon 2 | AAAAGCATCACTTGATCCTG | 23 | 145014 | 145033 | 227 |

TABLE 5
Inhibition of GHR mRNA by 3-10-4 MOE gapmers targeting intronic and exonic regions of SEQ ID NO: 1
and 2

| | SEQ | SEQ | | | | | | |
|---|---|---|---|---|---|---|---|---|
| | ID | ID | | | | | | |
| | NO: | NO: | | | | SEQ | SEQ ID | |
| | 1 | 1 | | | | ID NO: | NO: 2 | |
| ISIS | Start | Stop | Target | | % | 2 Start | Stop | SEQ |
| NO | Site | Site | Region | Sequence | inhibition | Site | Site | ID NO |
| 539284 | 206 | 222 | Exon 2 | CAAGGTCAACAGCAGCT | 62 | 144990 | 145006 | 228 |
| 539285 | 207 | 223 | Exon 2 | CCAAGGTCAACAGCAGC | 74 | 144991 | 145007 | 229 |
| 539286 | 208 | 224 | Exon 2 | GCCAAGGTCAACAGCAG | 73 | 144992 | 145008 | 230 |
| 539290 | 869 | 885 | Exon 7 | TCTCACACGCACTTCAT | 29 | 290367 | 290383 | 231 |
| 539291 | 870 | 886 | Exon 7 | ATCTCACACGCACTTCA | 51 | 290368 | 290384 | 232 |
| 539292 | 871 | 887 | Exon 7 | GATCTCACACGCACTTC | 56 | 290369 | 290385 | 233 |
| 539299 | n/a | n/a | Intron 1 | CTTTCATGAATCAAGCT | 63 | 17927 | 17943 | 234 |
| 539300 | n/a | n/a | Intron 1 | TCTTTCATGAATCAAGC | 49 | 17928 | 17944 | 235 |
| 539301 | n/a | n/a | Intron 1 | GTCTTTCATGAATCAAG | 61 | 17929 | 17945 | 236 |
| 539302 | n/a | n/a | Intron 1 | GGTCTTTCATGAATCAA | 93 | 17930 | 17946 | 237 |
| 539303 | n/a | n/a | Intron 1 | ATGGTCTTTCATGAATC | 74 | 17932 | 17948 | 238 |
| 539304 | n/a | n/a | Intron 1 | GATGGTCTTTCATGAAT | 56 | 17933 | 17949 | 239 |
| 539305 | n/a | n/a | Intron 1 | TATATCAATATTCTCCC | 42 | 21820 | 21836 | 240 |
| 539306 | n/a | n/a | Intron 1 | TTATATCAATATTCTCC | 33 | 21821 | 21837 | 241 |
| 539307 | n/a | n/a | Intron 1 | GTTATATCAATATTCTC | 12 | 21822 | 21838 | 242 |
| 539308 | n/a | n/a | Intron 1 | TTTCTTTAGCAATAGTT | 21 | 22518 | 22534 | 243 |
| 539309 | n/a | n/a | Intron 1 | CTTTCTTTAGCAATAGT | 38 | 22519 | 22535 | 244 |
| 539310 | n/a | n/a | Intron 1 | GCTTTCTTTAGCAATAG | 39 | 22520 | 22536 | 245 |
| 539311 | n/a | n/a | Intron 1 | AGGAATGGAAAACCAAA | 18 | 26497 | 26513 | 246 |
| | | | | | | 113031 | 113047 | |
| | | | | | | 121988 | 122004 | |
| 539312 | n/a | n/a | Intron 1 | CAGGAATGGAAAACCAA | 40 | 26498 | 26514 | 247 |
| | | | | | | 113032 | 113048 | |
| | | | | | | 121989 | 122005 | |
| 539313 | n/a | n/a | Intron 1 | TCAGGAATGGAAAACCA | 49 | 26499 | 26515 | 248 |
| | | | | | | 113033 | 113049 | |
| | | | | | | 121990 | 122006 | |
| 539314 | n/a | n/a | Intron 1 | TCTCCATTAGGGTTCTG | 87 | 50948 | 50964 | 249 |
| 539315 | n/a | n/a | Intron 1 | TTCTCCATTAGGGTTCT | 57 | 50949 | 50965 | 250 |
| 539316 | n/a | n/a | Intron 1 | GTTCTCCATTAGGGTTC | 73 | 50950 | 50966 | 251 |
| 539317 | n/a | n/a | Intron 1 | AGGTTGGCAGACAGACA | 73 | 53466 | 53482 | 252 |
| 539318 | n/a | n/a | Intron 1 | CAGGTTGGCAGACAGAC | 84 | 53467 | 53483 | 253 |
| 539319 | n/a | n/a | Intron 1 | GCAGGTTGGCAGACAGA | 85 | 53468 | 53484 | 254 |
| 539320 | n/a | n/a | Intron 1 | CTTCTTGTGAGCTGGCT | 87 | 64884 | 64900 | 255 |
| 539321 | n/a | n/a | Intron 1 | TCTTCTTGTGAGCTGGC | 89 | 64885 | 64901 | 256 |
| 539322 | n/a | n/a | Intron 1 | GTCTTCTTGTGAGCTGG | 87 | 64886 | 64902 | 257 |
| 539323 | n/a | n/a | Intron 1 | AGTCTTCTTGTGAGCTG | 70 | 64887 | 64903 | 258 |
| 539324 | n/a | n/a | Intron 1 | TCTTCCACTCACATCCA | 65 | 65990 | 66006 | 259 |
| 539325 | n/a | n/a | Intron 1 | CTCTTCCACTCACATCC | 78 | 65991 | 66007 | 260 |
| 539326 | n/a | n/a | Intron 1 | TCTCTTCCACTCACATC | 68 | 65992 | 66008 | 261 |
| 539327 | n/a | n/a | Intron 1 | GTCTCTTCCACTCACAT | 74 | 65993 | 66009 | 262 |
| 539328 | n/a | n/a | Intron 1 | ATAGATTTTGACTTCCC | 57 | 72107 | 72123 | 263 |
| 539329 | n/a | n/a | Intron 1 | CATAGATTTTGACTTCC | 35 | 72108 | 72124 | 264 |
| 539330 | n/a | n/a | Intron 1 | GCATAGATTTTGACTTC | 53 | 72109 | 72125 | 265 |
| 539331 | n/a | n/a | Intron 1 | AAAATGTCAACAGTGCA | 86 | 80639 | 80655 | 266 |
| 539332 | n/a | n/a | Intron 1 | CAAAATGTCAACAGTGC | 73 | 80640 | 80656 | 267 |
| 539333 | n/a | n/a | Intron 1 | CCAAAATGTCAACAGTG | 34 | 80641 | 80657 | 268 |
| 539334 | n/a | n/a | Intron 1 | CCCAAAATGTCAACAGT | 66 | 80642 | 80658 | 269 |
| 539335 | n/a | n/a | Intron 1 | CATGACTATGTTCTGGC | 67 | 125594 | 125610 | 270 |
| 539336 | n/a | n/a | Intron 1 | ACATGACTATGTTCTGG | 42 | 125595 | 125611 | 271 |
| 539337 | n/a | n/a | Intron 1 | CACATGACTATGTTCTG | 29 | 125596 | 125612 | 272 |
| 539338 | n/a | n/a | Intron 2 | GAATTCTGAGCTCTGGA | 77 | 145429 | 145445 | 273 |
| 539339 | n/a | n/a | Intron 2 | TGAATTCTGAGCTCTGG | 84 | 145430 | 145446 | 274 |
| 539340 | n/a | n/a | Intron 2 | CTGAATTCTGAGCTCTG | 80 | 145431 | 145447 | 275 |
| 539341 | n/a | n/a | Intron 2 | CCTGAATTCTGAGCTCT | 84 | 145432 | 145448 | 276 |
| 539342 | n/a | n/a | Intron 2 | GCCTGAATTCTGAGCTC | 84 | 145433 | 145449 | 277 |
| 539343 | n/a | n/a | Intron 2 | AGCCTGAATTCTGAGCT | 80 | 145434 | 145450 | 278 |
| 539344 | n/a | n/a | Intron 2 | ATATTGTAATTCTTGGT | 0 | 148059 | 148075 | 279 |
| 539345 | n/a | n/a | Intron 2 | GATATTGTAATTCTTGG | 20 | 148060 | 148076 | 280 |
| 539346 | n/a | n/a | Intron 2 | TGATATTGTAATTCTTG | 13 | 148061 | 148077 | 281 |
| 539347 | n/a | n/a | Intron 2 | CTGATATTGTAATTCTT | 8 | 148062 | 148078 | 282 |
| 539348 | n/a | n/a | Intron 2 | CCTGATATTGTAATTCT | 67 | 148063 | 148079 | 283 |
| 539349 | n/a | n/a | Intron 2 | GCCTGATATTGTAATTC | 73 | 148064 | 148080 | 284 |
| 539350 | n/a | n/a | Intron 2 | TGCCTGATATTGTAATT | 32 | 148065 | 148081 | 285 |
| 539351 | n/a | n/a | Intron 2 | AATTATGTGCTTTGCCT | 58 | 148907 | 148923 | 286 |
| 539352 | n/a | n/a | Intron 2 | CAATTATGTGCTTTGCC | 82 | 148908 | 148924 | 287 |
| 539353 | n/a | n/a | Intron 2 | TCAATTATGTGCTTTGC | 68 | 148909 | 148925 | 288 |
| 539354 | n/a | n/a | Intron 2 | GTCAATTATGTGCTTTG | 80 | 148910 | 148926 | 289 |
| 539355 | n/a | n/a | Intron 2 | GCCATCACCAAACACCA | 94 | 150972 | 150988 | 290 |
| 539356 | n/a | n/a | Intron 2 | TGCCATCACCAAACACC | 84 | 150973 | 150989 | 291 |
| 539357 | n/a | n/a | Intron 2 | TTGCCATCACCAAACAC | 74 | 150974 | 150990 | 292 |
| 539358 | n/a | n/a | Intron 2 | TGGTGACTCTGCCTGAT | 85 | 151387 | 151403 | 293 |
| 539359 | n/a | n/a | Intron 2 | CTGGTGACTCTGCCTGA | 86 | 151388 | 151404 | 294 |

TABLE 6
Inhibition of GHR mRNA by 5-10-5 MOE gapmers targeting intron 1 of SEQ ID NO: 2

| | | | SEQ | SEQ | |
|---|---|---|---|---|---|
| | | | ID | ID | |
| | | | NO: 2 | NO: 2 | SEQ |
| ISIS | | % | Start | Stop | ID |
| NO | Sequence | inhibition | Site | Site | NO |
| 523561 | TATTTCAGAAAGACTTTCTG | 11 | 10373 | 10392 | 295 |
| 523562 | AGGAAAAAATCAAGGAGTTA | 8 | 11173 | 11192 | 296 |
| 523563 | TATTTACTGAACACCTATTC | 12 | 11973 | 11992 | 297 |
| 523564 | GCCCATGAAGGCCACTCTTC | 70 | 12780 | 12799 | 298 |
| 523565 | ACCTATAAATAAAGTGAGGA | 0 | 13581 | 13600 | 299 |
| 523566 | GTTTCATAACCTGCTAATAA | 40 | 14451 | 14470 | 300 |
| 523567 | ATGTGCCTTACAGTTATCAG | 36 | 15251 | 15270 | 301 |
| 523568 | TTCTGAATTTAGAATTATAG | 0 | 16051 | 16070 | 302 |
| 523569 | GTTTATAATCTAGCAGTTAC | 26 | 17130 | 17149 | 303 |
| 523570 | GATGGTCTTTCATGAATCAA | 62 | 17930 | 17949 | 304 |
| 523571 | CATGTACCCAAACCAACACT | 65 | 18730 | 18749 | 305 |
| 523572 | TAAAATACAGCCTACATCAT | 0 | 19637 | 19656 | 306 |
| 523573 | CCATCACTACAACAAACTCA | 39 | 20451 | 20470 | 307 |
| 523574 | ATCTGAAATGATCCCCTTTC | 33 | 21283 | 21302 | 308 |
| 523575 | TGTTGCCCCTCCAAAAAGAC | 12 | 22144 | 22163 | 309 |
| 523576 | ATTAAAATTTTAAATGATGT | 0 | 22944 | 22963 | 310 |
| 523577 | CTCAGGAATGGAAAACCAAA | 71 | 26497 | 26516 | 311 |
| | | | 113031 | 113050 | |
| | | | 121988 | 122007 | |
| 523578 | AAAATTCTAGAAGATAACAT | 0 | 27838 | 27857 | 312 |
| 523579 | CTAGAAGTCCTAGCCAGAGT | 2 | 28748 | 28767 | 313 |
| 523580 | AACCGATATCACAGAAATAC | 0 | 29548 | 29567 | 314 |
| 523581 | AAGATAGACAGTAACATAAT | 0 | 30348 | 30367 | 315 |
| 523582 | GCACTACAAGAACTGCTTAA | 40 | 31172 | 31191 | 316 |
| 523583 | TTTCCAGACAAAGAATTCAG | 6 | 31978 | 31997 | 317 |
| 523584 | GTAGACAGCCTTTCTGGAAC | 20 | 32827 | 32846 | 318 |
| 523585 | CATCCTACATAGTGGCTGTG | 47 | 33635 | 33654 | 319 |
| 523586 | CAGAACAGTGTGTGGAGACT | 8 | 34452 | 34471 | 320 |
| 523587 | AGCTTTAAAAATACCTCTGC | 52 | 35466 | 35485 | 321 |
| 523588 | CCCAGGTACTTGCTCTCAGA | 22 | 36266 | 36285 | 322 |
| 523589 | TTACACCTGATTCTAGAAAT | 30 | 37066 | 37085 | 323 |
| 523590 | CTTTTCTCTACAACCTCACA | 34 | 38094 | 38113 | 324 |
| 523591 | TAGTAGTTTGAATTTCAAAG | 1 | 38909 | 38928 | 325 |
| 523592 | ATACAAAATTACTGCAGTCA | 60 | 39719 | 39738 | 326 |
| 523593 | GCCACTGCCAAAAAGGAGGA | 30 | 40519 | 40538 | 327 |
| 523594 | TGACAGAAACAGAGCTATGA | 33 | 41342 | 41361 | 328 |
| 523595 | ATCTTTTAGTATGAACCTTA | 65 | 42142 | 42161 | 329 |
| 523596 | AGTTATGTGACTCTGAGCAC | 63 | 43173 | 43192 | 330 |
| 523597 | ACTATGCCCTAGTTACTTCT | 29 | 43973 | 43992 | 331 |
| 523598 | TATAGTGGAAGTGATAGATC | 0 | 44812 | 44831 | 332 |
| 523599 | TGTTTTCTGAAATGGAATGT | 0 | 45733 | 45752 | 333 |
| 523600 | GCTGTAAATGTAATGAGTGT | 34 | 46553 | 46572 | 334 |
| 523601 | GAGAGAAGCCATGGCCCTAG | 20 | 47392 | 47411 | 335 |
| 523602 | CTCTCTTTCCCAGAACAAGA | 32 | 48210 | 48229 | 336 |
| 523603 | TCCAAAATGTCCAGTATAAT | 33 | 50072 | 50091 | 337 |
| 523604 | GTTCTCCATTAGGGTTCTGG | 74 | 50947 | 50966 | 338 |
| 523605 | TTAGTCACCCATCCACCACT | 41 | 51747 | 51766 | 339 |
| 523606 | CATGAATTCACCGAGTTAGG | 51 | 52573 | 52592 | 340 |
| 523607 | AGCAGGTTGGCAGACAGACA | 62 | 53466 | 53485 | 341 |
| 523608 | GAAAGACTTAAATTTTCACA | 0 | 54306 | 54325 | 342 |
| 523609 | TAGTAGAGGAAAAGGAGAAT | 0 | 55730 | 55749 | 343 |
| 523610 | AAACAGGGTCTGGAGTGGAC | 3 | 61243 | 61262 | 344 |
| 523611 | CAAGCTGATAATTAAAAAGA | 0 | 62462 | 62481 | 345 |
| 523612 | ATAAAGATACATTTTCTGGG | 8 | 63277 | 63296 | 346 |
| 523613 | CAGGATTCTTCCTGCCTGGC | 47 | 64085 | 64104 | 347 |
| 523614 | AAGTCTTCTTGTGAGCTGGC | 71 | 64885 | 64904 | 348 |
| 523615 | CTCTTCCACTCACATCCATT | 63 | 65988 | 66007 | 349 |
| 523616 | CCTATATCAGAAGACAAATG | 5 | 66806 | 66825 | 350 |
| 523617 | TCAAAACCCTGCCAAGGTAC | 44 | 67662 | 67681 | 351 |
| 523618 | TCATATTCTACTTCTGTTTA | 11 | 68462 | 68481 | 352 |
| 523619 | CATTCCAGTGTTTCAGTAAG | 13 | 69262 | 69281 | 353 |
| 523620 | GGCCTGGAATTAATCCTCAG | 49 | 70114 | 70133 | 354 |
| 523621 | AATGCCCTCTCCCTGTGCCT | 48 | 70925 | 70944 | 355 |
| 523622 | TTTATAATCAACCTTTGCTA | 9 | 71741 | 71760 | 356 |
| 523623 | ATATAACTACTTAAAATAAT | 0 | 72541 | 72560 | 357 |
| 523624 | TTAGCCAGGATATGGTTGCC | 50 | 73350 | 73369 | 358 |
| 523625 | CTACCTCCATCAAAGAAAAT | 0 | 74190 | 74209 | 359 |
| 523626 | GCATGCATAGATAAGTTTGA | 20 | 74990 | 75009 | 360 |
| 523627 | ATGAGAGTAAATGGATTTTC | 10 | 75790 | 75809 | 361 |
| 523628 | TTGGCAATCCTTGCTTAAAA | 34 | 76598 | 76617 | 362 |
| 523629 | GAATTAAGCCAGACTTATTT | 3 | 77398 | 77417 | 363 |
| 523630 | GGCTAAGTATTTGTAGCAGT | 55 | 78198 | 78217 | 364 |
| 523631 | TTGCCTGTGTGCAACTGGCG | 0 | 79005 | 79024 | 365 |
| 523632 | GTGGCCTTAGTAGGCCAGCT | 0 | 79827 | 79846 | 366 |
| 523633 | CCCAAAATGTCAACAGTGCA | 70 | 80639 | 80658 | 367 |
| 523634 | TTAAGCCTTCAATTTGAAAA | 0 | 81455 | 81474 | 368 |
| 523635 | TGCTCAGAAGGTTGAGCATA | 0 | 82261 | 82280 | 369 |
| 523636 | TTAATGCTTTCCCAAAGCTC | 35 | 83061 | 83080 | 370 |
| 523637 | AAAAGACTTCATACCTTTAC | 52 | 83884 | 83903 | 371 |

TABLE 7
Inhibition of GHR mRNA by 5-10-5 MOE gapmers targeting intron 1 of SEQ ID NO: 2

| | | | SEQ | SEQ | |
|---|---|---|---|---|---|
| | | | ID | ID | |
| | | | NO: 2 | NO: 2 | SEQ |
| ISIS | | % | Start | Stop | ID |
| NO | Sequence | inhibition | Site | Site | NO |
| 532146 | GGCCCCCTGGCACAACAGGA | 60 | 3097 | 3116 | 372 |
| 532147 | TCTAGGGTGATTCAGGTGGA | 62 | 4537 | 4556 | 373 |
| 532148 | CTTAGATTAATGCAAAACAA | 25 | 4875 | 4894 | 374 |
| 532149 | AGGCAGAGGAGGGTGGAACC | 34 | 6246 | 6265 | 375 |
| 532150 | AGTCTAATGAGATCTGATGG | 76 | 6499 | 6518 | 376 |
| 532151 | GCTGAAATGAGTTAAGACTT | 89 | 6737 | 6756 | 377 |
| 532152 | ACTTTGGACTGTGGATTTTT | 78 | 6765 | 6784 | 378 |
| 532153 | GCATATTTACACAATGCCTG | 84 | 6871 | 6890 | 379 |
| 532154 | GGAAATGCCTGGATGTCCAG | 27 | 7241 | 7260 | 380 |
| 532155 | CTGCTGATTTTGGAATGGAG | 68 | 10660 | 10679 | 381 |
| 532156 | ACTGAACACCTATTCTATGG | 51 | 11968 | 11987 | 382 |
| 532157 | TTTACTGAACACCTATTCTA | 23 | 11971 | 11990 | 383 |
| 532158 | CCCTCAAATTATCCACAAAC | 89 | 12053 | 12072 | 384 |
| 532159 | CTTCTAAATGTTTCCAAGGC | 63 | 12186 | 12205 | 385 |
| 532160 | TTACATCCTGTAGGCTAATT | 82 | 12469 | 12488 | 386 |
| 532161 | CCACTAGCCTGGCCAGACTT | 73 | 12487 | 12506 | 387 |
| 532162 | CTGGTAGATGATCTCAAGTT | 84 | 13351 | 13370 | 388 |
| 532163 | AAAGAATTGAGTTATAAATC | 23 | 13670 | 13689 | 389 |
| 532164 | AACTCATCTCTGGCCAGCAG | 89 | 14361 | 14380 | 390 |
| 532165 | CAACATCATTGTATTTTCTG | 33 | 14965 | 14984 | 391 |
| 532166 | TCTTAGCTTACCAATGAGGA | 81 | 15085 | 15104 | 392 |
| 532167 | TTCCCAGAGCCAAAGCTCAA | 77 | 15982 | 16001 | 393 |
| 532168 | TTTGGCCAATCCCAGCTTAT | 59 | 16253 | 16272 | 394 |
| 532169 | GTTTGCAAATCTTCATTCAC | 71 | 16447 | 16466 | 395 |
| 532170 | CAATAGTCCCTGAGGCTTGG | 74 | 16476 | 16495 | 396 |
| 532171 | TTTCCCCAGATTAAATGCCC | 85 | 17650 | 17669 | 397 |
| 532172 | TTCAATAATGCAGTTATTAT | 0 | 18308 | 18327 | 398 |
| 532173 | AAATTCTTGGGCTTAAGCAC | 69 | 18638 | 18657 | 399 |
| 532174 | ACATGTACCCAAACCAACAC | 71 | 18731 | 18750 | 91 |
| 532175 | TGATCCAAATTCAGTACCTA | 82 | 18752 | 18771 | 400 |
| 532176 | GATGATCCAAATTCAGTACC | 54 | 18754 | 18773 | 401 |
| 532177 | CAATATTCATCTTTATATTC | 25 | 19106 | 19125 | 402 |
| 532178 | ATTGCTCTTAAGATAAGTAA | 41 | 19661 | 19680 | 403 |
| 532179 | CAGCTCCCTGAATATCTCTT | 74 | 19783 | 19802 | 404 |
| 532180 | ACTTCACAAATATATTATAA | 0 | 19885 | 19904 | 405 |
| 532181 | GTACAGTCAACTTTACTTCA | 89 | 19899 | 19918 | 406 |
| 532182 | CAATTCCCACTCTTGTCAAC | 55 | 20288 | 20307 | 407 |
| 532183 | TCAACTGCTTTCTGGAGCAG | 66 | 21215 | 21234 | 408 |
| 532184 | ACTGCTGAGCACCTCCAAAA | 73 | 21454 | 21473 | 409 |
| 532185 | CTTAGATTCCTGGTTTATCA | 78 | 21587 | 21606 | 410 |
| 532186 | AGTTATATCAATATTCTCCC | 88 | 21820 | 21839 | 411 |
| 532187 | TATACCATCTTCCCCATAAA | 32 | 22038 | 22057 | 412 |
| 532188 | GGCTTTCTTTAGCAATAGTT | 86 | 22518 | 22537 | 413 |
| 532189 | TACCAGGGATGTAGGTTTAC | 82 | 29050 | 29069 | 414 |
| 532190 | TCACAGCTGAATTCTATCTG | 80 | 29323 | 29342 | 415 |
| 532191 | GGAGATGGACAAATTCCTGC | 77 | 29470 | 29489 | 416 |
| 532192 | CTAGACATGTCATCAAGACA | 19 | 30294 | 30313 | 417 |
| 532193 | CAAATTAATAAAACAATTAC | 10 | 30385 | 30404 | 418 |
| 532194 | TATTCTTATATCAGACAAAA | 30 | 30532 | 30551 | 419 |
| 532195 | TCAAGGGATCCCTGCCATTC | 32 | 32361 | 32380 | 420 |
| 532196 | CGTCAAGGGATCCCTGCCAT | 47 | 32363 | 32382 | 421 |
| 532197 | GGCACTCCCAGTCTCCAGCT | 83 | 34138 | 34157 | 422 |
| 532198 | TTTCTCCAGCAGAAGTGTCA | 60 | 34845 | 34864 | 423 |
| 532199 | AAGTCCTCTTCCGCCTCCCT | 82 | 36023 | 36042 | 424 |
| 532200 | GGAATTTACCAAAAACAGTT | 63 | 36721 | 36740 | 425 |
| 532201 | AGTTAGGTATTGTCCATTTT | 74 | 37032 | 37051 | 426 |
| 532202 | ACATGGGTATCTTCTAGGAA | 77 | 37111 | 37130 | 427 |
| 532203 | TCAGTTTCAGAGAGACAAAA | 41 | 37276 | 37295 | 428 |
| 532204 | TTTGCCAGGTCCTATGTCGA | 69 | 37656 | 37675 | 429 |
| 532205 | ATTCCCTTTTCTCTACAACC | 70 | 38099 | 38118 | 430 |
| 532206 | ATGATAAGAGCCAAGATTTG | 13 | 38994 | 39013 | 431 |
| 532207 | GAAAAAAGGTCCACTGTGGT | 49 | 40356 | 40375 | 432 |
| 532208 | CCTGTCCTGGAATAGTTTCA | 49 | 41164 | 41183 | 433 |
| 532209 | TAGAAAAGTAAATAAGGAAT | 15 | 41501 | 41520 | 434 |
| 532210 | TTATAAAACTATGCAATAGG | 0 | 41889 | 41908 | 435 |
| 532211 | TTATTTCATATTTCCAGAAA | 0 | 42675 | 42694 | 436 |
| 532212 | CATGAATTACAGCTAAAGAT | 20 | 42741 | 42760 | 437 |
| 532213 | TTGCATGTATGTGTTTCTGA | 62 | 43518 | 43537 | 438 |
| 532214 | TCAATCTCTTTATACCCTTA | 75 | 43765 | 43784 | 439 |
| 532215 | TCTTCAATCTCTTTATACCC | 58 | 43768 | 43787 | 440 |
| 532216 | CTATGCCCTAGTTACTTCTA | 47 | 43972 | 43991 | 441 |
| 532217 | AAAGAGAATCTCTTCCTTTT | 27 | 44070 | 44089 | 442 |
| 532218 | TCATTAAAGATTATTATAAC | 0 | 44222 | 44241 | 443 |
| 532219 | TTTGGATGAGTGGAAGGCTA | 0 | 44528 | 44547 | 444 |
| 532220 | GGAAATGGCCTTTTTCCTTA | 72 | 45400 | 45419 | 445 |
| 532221 | GGAGAAGCCCTCTGCCTGTA | 60 | 46477 | 46496 | 446 |
| 532222 | AAACCATATTGTCCACCAGA | 84 | 46510 | 46529 | 447 |

TABLE 8
Inhibition of GHR mRNA by 5-10-5 MOE gapmers targeting intron 1 of SEQ ID NO: 2

| | | | SEQ | SEQ | |
|---|---|---|---|---|---|
| | | | ID | ID | SEQ |
| | | | NO: 2 | NO: 2 | ID |
| ISIS | | % | Start | Stop | NO |
| NO | Sequence | inhibition | Site | Site | NO |
| 532223 | CTCAAACCATATTGTCCACC | 90 | 46513 | 46532 | 448 |
| 532224 | GTGTAAATAGTGACTTGTAC | 76 | 50123 | 50142 | 449 |
| 532225 | TGAGGCACAGGAAAGTTAAC | 52 | 50719 | 50738 | 450 |
| 532226 | AGCTATAGTTCTCCATTAGG | 74 | 50954 | 50973 | 451 |
| 532227 | TTACTTGCTGACTAAGCCAT | 69 | 51071 | 51090 | 452 |
| 532228 | GTTTGTCAACTCAACATCAA | 73 | 51215 | 51234 | 453 |
| 532229 | GACTATTTGTATATATATAC | 33 | 51491 | 51510 | 454 |
| 532230 | ATGACTATTTGTATATATAT | 11 | 51493 | 51512 | 455 |
| 532231 | ACTCTTCCTTATATTTGCTC | 76 | 51778 | 51797 | 456 |
| 532232 | ATACACTGACTTTTAACATT | 67 | 52039 | 52058 | 457 |
| 532233 | CTTAGAAACAGTAGTTTCAT | 42 | 52124 | 52143 | 458 |
| 532234 | CTGAGCTTTGCCTTAAGAAT | 79 | 52633 | 52652 | 459 |
| 532235 | CACCAGACAGCAGGTAGAGC | 81 | 53540 | 53559 | 460 |
| 532236 | GAGATGGAGTAGAAGGCAAA | 43 | 55926 | 55945 | 461 |
| 532237 | TAGGAAAGGAAGAATACACT | 33 | 63881 | 63900 | 462 |
| 532238 | TAGACCAGGAAGGGTGAGAG | 27 | 64376 | 64395 | 463 |
| 532239 | AAGTTGGATCTGGCATGCAT | 64 | 64574 | 64593 | 464 |
| 532240 | AAAGTTGGATCTGGCATGCA | 70 | 64575 | 64594 | 465 |
| 532241 | CCATAACTCTTCTAACTGGG | 84 | 64643 | 64662 | 466 |
| 532242 | ATATTAAAGTTTGAGAACTA | 37 | 65080 | 65099 | 467 |
| 532243 | CTTAACTACAAAATGCTGGA | 71 | 66164 | 66183 | 468 |
| 532244 | TGAGCAGCTGTCCTCAGTTC | 43 | 67061 | 67080 | 469 |
| 532245 | GAGTTCATAAAAGTTTTACT | 26 | 67251 | 67270 | 470 |
| 532246 | CTATCCACACCATTCCATAA | 73 | 69203 | 69222 | 471 |
| 532247 | AACATCTAAGTAATGCAAAC | 58 | 69223 | 69242 | 472 |
| 532248 | TTTGCATTCAAAGCCCTGGG | 91 | 69565 | 69584 | 473 |
| 532249 | TCCATATTATAGGCTATGAT | 73 | 69889 | 69908 | 474 |
| 532250 | ATTTTATGATAATGTAAAAC | 27 | 69942 | 69961 | 475 |
| 532251 | GAGATCACATTTTCTGAGTA | 50 | 70352 | 70371 | 476 |
| 532252 | ACCTCCCTAGGATTACCTCA | 56 | 71617 | 71636 | 477 |
| 532253 | AAAATCTGATTTATAATCAA | 40 | 71750 | 71769 | 478 |
| 532254 | AGCATAGATTTTGACTTCCC | 92 | 72107 | 72126 | 479 |
| 532255 | AAAGTCATATACACAGGTCT | 53 | 72584 | 72603 | 480 |
| 532256 | CTCATAGCAAATTCCCAGAA | 66 | 73689 | 73708 | 481 |
| 532257 | CAACATGGAGGCTAGCATGT | 55 | 74112 | 74131 | 482 |
| 532258 | AGACTAAGTGGCCTGAATGT | 52 | 74317 | 74336 | 483 |
| 532259 | ACCTACCATGTCACTCTCAA | 61 | 74418 | 74437 | 484 |
| 532260 | AACTTTCTTGTGTTTTATCA | 9 | 75511 | 75530 | 485 |
| 532261 | TTTGCAAGACAAAGAAATGA | 31 | 75915 | 75934 | 486 |
| 532262 | CATGCAAAGTGTTCCTCTTC | 63 | 76024 | 76043 | 487 |
| 532263 | AGTGCTTTGCTTTCTCTTAT | 79 | 76047 | 76066 | 488 |
| 532264 | GAACAAGAAACACTTGGTAA | 44 | 76555 | 76574 | 489 |
| 532265 | AGTGTTCCAATTAAATGGCA | 34 | 76643 | 76662 | 490 |
| 532266 | AAACAATGCCCTTGTAGTGA | 57 | 76703 | 76722 | 491 |
| 532267 | TATTCTAGGTTTTGAGGTGA | 60 | 76752 | 76771 | 492 |
| 532268 | ATATTCTAGGTTTTGAGGTG | 24 | 76753 | 76772 | 493 |
| 532269 | GTTTTCCATTCTTTAAGAAA | 41 | 76896 | 76915 | 494 |
| 532270 | AGCAATCCATTGATTGTATG | 59 | 77044 | 77063 | 495 |
| 532271 | AATTATGGCAAAATGGAAAA | 37 | 77076 | 77095 | 496 |
| 532272 | ACATTTGCTTATGAGACTAT | 62 | 77638 | 77657 | 497 |
| 532273 | GCAGAGATAATCCTATGATG | 42 | 77841 | 77860 | 498 |
| 532274 | TCCATCTGTTACCTCTCTGT | 77 | 78122 | 78141 | 499 |
| 532275 | TTTGCCTGAAGGGCAGAACC | 40 | 79478 | 79497 | 500 |
| 532276 | GAAAAAATCAGATTTTCACA | 0 | 79664 | 79683 | 501 |
| 532277 | AACTTAATTTAATCATTTCT | 0 | 79959 | 79978 | 502 |
| 532278 | TTTGGTTGTCATGAGTTGAG | 67 | 80756 | 80775 | 503 |
| 532279 | TTCCATCTCTAGGGCACTTT | 74 | 80900 | 80919 | 504 |
| 532280 | AGAGCTTATTTTCAAAATTC | 36 | 80920 | 80939 | 505 |
| 532281 | ATAAAGAGCAAACAAACATA | 42 | 81524 | 81543 | 506 |
| 532282 | TATAAATTCCTTGGTCTGAT | 33 | 82835 | 82854 | 507 |
| 532283 | AAAATATAAATTCCTTGGTC | 13 | 82839 | 82858 | 508 |
| 532284 | TTTTATAACAGCCTCTGACA | 38 | 82959 | 82978 | 509 |
| 532285 | AAAAGACCATGTTGCTTATT | 72 | 83179 | 83198 | 510 |
| 532286 | ATAGTCAGTCAGAATGTGGT | 72 | 83330 | 83349 | 511 |
| 532287 | TGCCTTAGCTTGGAAAAGAC | 78 | 83897 | 83916 | 512 |
| 532288 | AGGGCTAGCTGATGCCTCTC | 69 | 84026 | 84045 | 513 |
| 532289 | TTGGACTGGGCTCAAACAGA | 72 | 84381 | 84400 | 514 |
| 532290 | AAAGTCAGGCTAGAGGGACT | 49 | 85713 | 85732 | 515 |
| 532291 | TCCTTGTTTTCTTGTAATGA | 50 | 85945 | 85964 | 516 |
| 532292 | ACACCAGAGGAAGGAAATCA | 44 | 86554 | 86573 | 517 |
| 532293 | GATGTACACCATTTTGAATT | 15 | 86629 | 86648 | 518 |
| 532294 | TGCTCTGGCCTAGCCTATGT | 62 | 86901 | 86920 | 519 |
| 532295 | CAGAGGTGTCTCCCAAGAAA | 60 | 89940 | 89959 | 520 |
| 532296 | AAAGAGAATGGATCAAAGCT | 36 | 91930 | 91949 | 521 |
| 532297 | GATTTGCAGAACAAATCTTG | 37 | 93332 | 93351 | 522 |
| 532298 | TGGTTATGAAGGTTGGACCA | 52 | 94839 | 94858 | 523 |
| 532299 | TGGCTAATTAATGGGCAATT | 63 | 95292 | 95311 | 524 |

TABLE 9
Inhibition of GHR mRNA by 5-10-5 MOE gapmers targeting intron 1 of SEQ ID NO: 2

| | | | SEQ | SEQ | |
|---|---|---|---|---|---|
| | | | ID | ID | |
| | | | NO: 2 | NO: 2 | SEQ |
| ISIS | | % | Start | Stop | ID |
| NO | Sequence | inhibition | Site | Site | NO |
| 532300 | CTGTGCCATATTGCCTCTAA | 87 | 95471 | 95490 | 525 |
| 532301 | GATTTCAACCAGCTCACCTG | 48 | 95510 | 95529 | 526 |
| 532302 | GCAAAAGGGAACCCTGAAGC | 71 | 95564 | 95583 | 527 |
| 532303 | CTAAGTGTTATAACAAACAC | 43 | 96137 | 96156 | 528 |
| 532304 | GTCCATTGGTATAAAACTCA | 84 | 96282 | 96301 | 529 |
| 532305 | TTTCAATACAATAAGATTTA | 34 | 96793 | 96812 | 530 |
| 532306 | GTCCTTAGACCCCTCAATGG | 62 | 96987 | 97006 | 531 |
| 532307 | GAGGATTTATTCATCTAGGC | 68 | 97806 | 97825 | 532 |
| 532308 | CAGTGGGAGGATCAGATATC | 46 | 97870 | 97889 | 533 |
| 532309 | ATCCCATCCAGCAGCTGGAC | 67 | 98132 | 98151 | 534 |
| 532310 | AACTTGGGATGAGTTACTGA | 56 | 98653 | 98672 | 535 |
| 532311 | GAAGGCTACCTAAAAGAAAT | 43 | 98810 | 98829 | 536 |
| 532312 | AAAGAAATATTCACAACATT | 39 | 99096 | 99115 | 537 |
| 532313 | ATGCTTATACTGCTGCTGTA | 69 | 99791 | 99810 | 538 |
| 532314 | TCCTCACTTCAATCACCTTT | 70 | 99819 | 99838 | 539 |
| 532315 | CTCTTTCTTCATAAATAAGT | 33 | 100809 | 100828 | 540 |
| 532316 | TGGTAATCTGTGTCCCTTTA | 96 | 101242 | 101261 | 541 |
| 532317 | TAATAAAAAAGTTTGAAACA | 41 | 102549 | 102568 | 542 |
| 532318 | GGTGGTGGCAAGAGAAAAAT | 56 | 103015 | 103034 | 543 |
| 532319 | CAAAAGGCCCTTTTTACATG | 28 | 103034 | 103053 | 544 |
| 532320 | ACTCTACTGGTACCAATTTA | 31 | 103173 | 103192 | 545 |
| 532321 | TCTGAACTTTTATGCTCTGT | 76 | 103606 | 103625 | 546 |
| 532322 | AACTTTTGCCTGGGCATCCA | 16 | 104067 | 104086 | 547 |
| 532323 | TGACTCCATGTCTCACATCC | 66 | 104392 | 104411 | 548 |
| 532324 | TTACTTCCTAGATACAACAG | 53 | 104541 | 104560 | 549 |
| 532325 | CTGGCCCCCATGATTCAATT | 44 | 104835 | 104854 | 550 |
| 532326 | AAGACTGGCCCCCATGATTC | 49 | 104839 | 104858 | 551 |
| 532327 | TGTCACTGGTCTGTGTATTT | 60 | 106233 | 106252 | 552 |
| 532328 | ACAGAGTAGATTTAGCATAA | 23 | 106980 | 106999 | 553 |
| 532329 | TAAACAGGTGTACTATTACA | 27 | 107030 | 107049 | 554 |
| 532330 | GCTTTATCAACTAAGTTTAT | 22 | 107716 | 107735 | 555 |
| 532331 | CAGAACTTCTTTTAAAATTG | 8 | 107763 | 107782 | 556 |
| 532332 | GAATACAGACATACCTTGAA | 25 | 108514 | 108533 | 557 |
| 532333 | CCATGACAACAATTTCAGAG | 58 | 109486 | 109505 | 558 |
| 532334 | ACAAATAGCAATGAATGGGT | 45 | 110878 | 110897 | 559 |
| 532335 | CAACAAATAGCAATGAATGG | 47 | 110880 | 110899 | 560 |
| 532336 | GTACACAAATCAGTAGCTCT | 72 | 115087 | 115106 | 561 |
| 532337 | CTATGTCAAAAAGACTGAAA | 4 | 116370 | 116389 | 562 |
| 532338 | ATATACAGAACATTTCATCC | 13 | 116743 | 116762 | 563 |
| 532339 | AGAATAGATAAGAACTCACC | 32 | 117195 | 117214 | 564 |
| 532340 | AGGAAAGATACAGTCATTTT | 5 | 117507 | 117526 | 565 |
| 532341 | GCACAAAGAACACCTGGGAA | 43 | 117781 | 117800 | 566 |
| 532342 | CAAGAAGTCTGGGATTATGT | 0 | 117938 | 117957 | 567 |
| 532343 | GTTAGTTATTAAGCTAATCA | 48 | 118245 | 118264 | 568 |
| 532344 | AACCATTATTTATAGGCTAA | 14 | 119127 | 119146 | 569 |
| 532345 | CCAGAATGCGATCACTTCTT | 76 | 120826 | 120845 | 570 |
| 532346 | CCAGAAATTATCCTCCTCTC | 70 | 121209 | 121228 | 571 |
| 532347 | AGGGAAATGCAAATTAAAAC | 20 | 122479 | 122498 | 572 |
| 532348 | GCATCAAGATACAGAAAAAT | 24 | 122751 | 122770 | 573 |
| 532349 | GAATGTTTATGAGATTTTTC | 0 | 123571 | 123590 | 574 |
| 532350 | GCCAATTATATTGCCACATT | 23 | 124413 | 124432 | 575 |
| 532351 | ATACTTGCTTATGTAGAAAT | 45 | 124589 | 124608 | 576 |
| 532352 | TAATACTTGCTTATGTAGAA | 3 | 124591 | 124610 | 577 |
| 532353 | GAACACATGGCATTCTGATA | 36 | 125178 | 125197 | 578 |
| 532354 | CAGAATTTGCAGTATAAATC | 0 | 126051 | 126070 | 579 |
| 532355 | TATGTTTTGAAATCTTATTT | 0 | 126157 | 126176 | 580 |
| 532356 | ACTCACTGCTACCTCATTAA | 11 | 126998 | 127017 | 581 |
| 532357 | AAGCAGTGATAGGGTATCTG | 59 | 127080 | 127099 | 582 |
| 532358 | ATGAGGCCTATTACAATGGA | 14 | 127170 | 127189 | 583 |
| 532359 | CTGGAGTCTCATGAGGCCTA | 53 | 127180 | 127199 | 584 |
| 532360 | TGACTATCAGCCTTTTAATC | 45 | 127663 | 127682 | 585 |
| 532361 | TTCAGAGAACAACCTTTGAA | 0 | 127959 | 127978 | 586 |
| 532362 | AGCCATGTGTGATCTGATGT | 53 | 128813 | 128832 | 587 |
| 532363 | GAAATTTACTCCAAACTAGC | 17 | 128992 | 129011 | 588 |
| 532364 | AACATCCAGACCACCATCTA | 35 | 130094 | 130113 | 589 |
| 532365 | GTACCAAACCATTCATGCTC | 56 | 131036 | 131055 | 590 |
| 532366 | AGTACCAAACCATTCATGCT | 24 | 131037 | 131056 | 591 |
| 532367 | TTATAGAGCTTGAGATTGAC | 7 | 132165 | 132184 | 592 |
| 532368 | AGTCCATTATAGAGCTTGAG | 58 | 132171 | 132190 | 593 |
| 532369 | AACCATGAGATGCAATGCAG | 40 | 132498 | 132517 | 594 |
| 532370 | AGGATTGAGAATCGCTGATT | 42 | 133168 | 133187 | 595 |
| 532371 | TCTAAAGCATGGCCAGGATT | 48 | 133182 | 133201 | 596 |
| 532372 | GGGACTGAGTATTGATACTT | 44 | 133222 | 133241 | 597 |
| 532373 | AGAAGTAGGGTGTTCCAGAT | 29 | 133523 | 133542 | 598 |
| 532374 | AGAAATAGTCTTCCTACTAA | 0 | 133547 | 133566 | 599 |
| 532375 | GCCTCCTTTAAGCTTCTATG | 22 | 134240 | 134259 | 600 |
| 532376 | GGCCTGCCTTTACTTTCCCA | 36 | 134598 | 134617 | 601 |

TABLE 10
Inhibition of GHR mRNA by 5-10-5 MOE gapmers targeting introns 1 and 2 of SEQ ID NO: 2

| | SEQ | SEQ | | | | | | |
|---|---|---|---|---|---|---|---|---|
| | ID | ID | | | | | | |
| | NO: | NO: | | | | SEQ | SEQ | |
| | 1 | 1 | | | | ID NO: | ID NO: | |
| ISIS | Start | Stop | | Target | % | 2 Start | 2 Stop | SEQ ID |
| NO | Site | Site | Sequence | region | inhibition | Site | Site | NO |
| 523638 | n/a | n/a | ACCTCAGTGGACTCTTTCCA | Intron 1 | 4 | 84684 | 84703 | 602 |
| 523639 | n/a | n/a | CAAACCTAAGTTCAAGTCCT | Intron 1 | 62 | 85523 | 85542 | 603 |
| 523640 | n/a | n/a | AGTTTCACTTCTTGAATCAA | Intron 1 | 38 | 86373 | 86392 | 604 |
| 523641 | n/a | n/a | AAGATCAAATGAGGTCAAGG | Intron 1 | 30 | 87181 | 87200 | 605 |
| 523642 | n/a | n/a | TAGATACAAATTTCATCACA | Intron 1 | 23 | 88063 | 88082 | 606 |
| 523643 | n/a | n/a | ATTCCTAAAATAGGAGCAGG | Intron 1 | 45 | 88870 | 88889 | 607 |
| 523644 | n/a | n/a | TTTTTATGTTGTATAAGATA | Intron 1 | 0 | 89670 | 89689 | 608 |
| 523645 | n/a | n/a | GTTCAGCCAATACATGAGTA | Intron 1 | 48 | 90473 | 90492 | 609 |
| 523646 | n/a | n/a | CCAGAGGGAGTTCATTACCA | Intron 1 | 62 | 91273 | 91292 | 610 |
| 523647 | n/a | n/a | TCTCTCTAATTCAACCTTAT | Intron 1 | 44 | 92107 | 92126 | 611 |
| 523648 | n/a | n/a | ATAATCCTCAGACCTCTTTA | Intron 1 | 29 | 92925 | 92944 | 612 |
| 523649 | n/a | n/a | CACTGTGGCAGAATTCCAAG | Intron 1 | 28 | 93762 | 93781 | 613 |
| 523650 | n/a | n/a | ACACCTTGGTGCCTAGAAGC | Intron 1 | 54 | 94581 | 94600 | 614 |
| 523651 | n/a | n/a | GTAGCAATGACACCTAAGAA | Intron 1 | 58 | 95394 | 95413 | 615 |
| 523652 | n/a | n/a | TTTAAAATAATAAATGCTTA | Intron 1 | 0 | 96194 | 96213 | 616 |
| 523653 | n/a | n/a | TCATTTGGTCCTTAGACCCC | Intron 1 | 27 | 96994 | 97013 | 617 |
| 523654 | n/a | n/a | TTATTCATCTAGGCCGAGTG | Intron 1 | 57 | 97800 | 97819 | 618 |
| 523655 | n/a | n/a | TTGCAGAATCTTCTCTTTGG | Intron 1 | 65 | 98627 | 98646 | 619 |
| 523656 | n/a | n/a | ACCATAAAGCTATGCCATAA | Intron 1 | 63 | 99481 | 99500 | 620 |
| 523657 | n/a | n/a | GGCAAGGAGCACAATAGGAC | Intron 1 | 20 | 100281 | 100300 | 621 |
| 523658 | n/a | n/a | ACCCAAAAAGTTGAGCTGAG | Intron 1 | 66 | 101081 | 101100 | 622 |
| 523659 | n/a | n/a | TAGATTTTCAGACTCTTTCT | Intron 1 | 46 | 101887 | 101906 | 623 |
| 523660 | n/a | n/a | AATTTCAATATTGTTGTGTT | Intron 1 | 0 | 102760 | 102779 | 624 |
| 523661 | n/a | n/a | ATGCTTTTAATGGCACCCAA | Intron 1 | 69 | 103569 | 103588 | 625 |
| 523662 | n/a | n/a | CATGTCTCACATCCAGGTCA | Intron 1 | 37 | 104386 | 104405 | 626 |
| 523663 | n/a | n/a | TTCACTGGAGTAGACTTTTA | Intron 1 | 45 | 105255 | 105274 | 627 |
| 523664 | n/a | n/a | CTTATAAGGGAGGTCTGGTA | Intron 1 | 41 | 106147 | 106166 | 628 |
| 523665 | n/a | n/a | GCATAATTCTTAAGGGCCCT | Intron 1 | 71 | 106966 | 106985 | 629 |
| 523666 | n/a | n/a | CCACAGAACTTCTTTTAAAA | Intron 1 | 27 | 107766 | 107785 | 630 |
| 523667 | n/a | n/a | GGTGACCATGATTTTAACAA | Intron 1 | 25 | 108566 | 108585 | 631 |
| 523668 | n/a | n/a | AACAGCTGCATGACAATTTT | Intron 1 | 50 | 109382 | 109401 | 632 |
| 523669 | n/a | n/a | AGAAACAGAATCAGTGACTT | Intron 1 | 44 | 110403 | 110422 | 633 |
| 523670 | n/a | n/a | CAGATTCCAGAGAAAAGCCA | Intron 1 | 14 | 111203 | 111222 | 634 |
| 523671 | n/a | n/a | TGTGAGAAGAACTCTATCAC | Intron 1 | 12 | 112030 | 112049 | 635 |
| 523672 | n/a | n/a | CTCACAAATCACCACTAAAG | Intron 1 | 31 | 112842 | 112861 | 636 |
| 523673 | n/a | n/a | CAACGAGTGGATAAAGAAAC | Intron 1 | 28 | 113646 | 113665 | 637 |
| 523674 | n/a | n/a | ATAAAACTGGATCCTCATCT | Intron 1 | 13 | 114446 | 114465 | 638 |
| 523675 | n/a | n/a | ATTAAAACTCTCAGCAAAAT | Intron 1 | 0 | 115450 | 115469 | 639 |
| 523676 | n/a | n/a | AAAGACTGAAAGAACACAAA | Intron 1 | 0 | 116361 | 116380 | 640 |
| 523677 | n/a | n/a | TATCTGCTGCCTTCAGGAGA | Intron 1 | 0 | 117168 | 117187 | 641 |
| 523678 | n/a | n/a | TTTGAATTAACCCAATTCAA | Intron 1 | 0 | 117999 | 118018 | 642 |
| 523679 | n/a | n/a | TCTTAATTTACAACAGAGGA | Intron 1 | 25 | 118821 | 118840 | 643 |
| 523680 | n/a | n/a | AGAAAAGTGACAGGCTTCCC | Intron 1 | 31 | 119659 | 119678 | 644 |
| 523681 | n/a | n/a | ATGTTCCTTGAAGATCCCAA | Intron 1 | 37 | 120478 | 120497 | 645 |
| 523682 | n/a | n/a | ATGAATAACACTTGCCACAA | Intron 1 | 0 | 121379 | 121398 | 646 |
| 523683 | n/a | n/a | GTATGTTTATCACAGCACAG | Intron 1 | 56 | 122180 | 122199 | 647 |
| 523684 | n/a | n/a | AAACACTGCAATATTAGGTT | Intron 1 | 34 | 123031 | 123050 | 648 |
| 523685 | n/a | n/a | GATTGGTGCTTTTCAAACTG | Intron 1 | 39 | 123936 | 123955 | 649 |
| 523686 | n/a | n/a | ATTTGTAAGACAAACATGAA | Intron 1 | 9 | 124764 | 124783 | 650 |
| 523687 | n/a | n/a | TCACATGACTATGTTCTGGC | Intron 1 | 72 | 125594 | 125613 | 651 |
| 523688 | n/a | n/a | AGTCCTGTCCACACTATTAA | Intron 1 | 6 | 126415 | 126434 | 652 |
| 523689 | n/a | n/a | CTGGGCTCTGCCTGCTGAAC | Intron 1 | 17 | 127217 | 127236 | 653 |
| 523690 | n/a | n/a | AAAACCCTTAAGTATTTCCT | Intron 1 | 12 | 128054 | 128073 | 654 |
| 523691 | n/a | n/a | CTCTGTTTCAAACCCCCCAG | Intron 1 | 21 | 128854 | 128873 | 655 |
| 523692 | n/a | n/a | GGACAGAACACCAATCACAA | Intron 1 | 18 | 129654 | 129673 | 656 |
| 523693 | n/a | n/a | ACCTACCCTTCAAAGTCACG | Intron 1 | 0 | 130486 | 130505 | 657 |
| 523694 | n/a | n/a | TTCAGTTCCCAGGAGGCTTA | Intron 1 | 5 | 131286 | 131305 | 658 |
| 523695 | n/a | n/a | TTTTGCAATGTCTAGCAATT | Intron 1 | 0 | 132086 | 132105 | 659 |
| 523696 | n/a | n/a | ATTAAGATCAGAAAATATTA | Intron 1 | 0 | 132953 | 132972 | 660 |
| 523697 | n/a | n/a | TTAATGAGATATTTTGCACC | Intron 1 | 34 | 133858 | 133877 | 661 |
| 523698 | n/a | n/a | GAGAGGTTAAGTAAATCTCC | Intron 1 | 0 | 134678 | 134697 | 662 |
| 523699 | n/a | n/a | CAGACTCAAATTTGAAAATT | Intron 1 | 14 | 135500 | 135519 | 663 |
| 523700 | n/a | n/a | GATAAGGCAATAATACAGCC | Intron 1 | 1 | 136306 | 136325 | 664 |
| 523701 | n/a | n/a | ATCATTTGCCAATTTCTGTG | Intron 1 | 28 | 137133 | 137152 | 665 |
| 523702 | n/a | n/a | CAAGAAGAAAAGATGCAAAA | Intron 1 | 0 | 138035 | 138054 | 666 |
| 523703 | n/a | n/a | AATTTATTTCCTTCCTATGA | Intron 1 | 0 | 138857 | 138876 | 667 |
| 523704 | n/a | n/a | TTTTGGAAATGTGAGAAACG | Intron 1 | 0 | 139771 | 139790 | 668 |
| 523705 | n/a | n/a | AAACACATGAGAAAAGATGA | Intron 1 | 0 | 140593 | 140612 | 669 |
| 523706 | n/a | n/a | TGTTGGCTCAGTGGGAATGA | Intron 1 | 0 | 141412 | 141431 | 670 |
| 523707 | n/a | n/a | TGAACAGGTTTGCATTTCTC | Intron 1 | 42 | 142229 | 142248 | 671 |
| 523708 | n/a | n/a | TCCTAGGTGAACAGGCTATG | Intron 1 | 38 | 143029 | 143048 | 672 |
| 523709 | n/a | n/a | CCCTAATCAGGCTGAAATAA | Intron 1 | 0 | 143829 | 143848 | 673 |
| 523710 | n/a | n/a | AGGGCCAGTAAGGTTTGCTT | Intron 1 | 12 | 144631 | 144650 | 674 |
| 523711 | n/a | n/a | AGCCTGAATTCTGAGCTCTG | Intron 2 | 88 | 145431 | 145450 | 675 |
| 523712 | n/a | n/a | AGAGGATCTCAGCTGCAATT | Intron 2 | 71 | 146238 | 146257 | 676 |
| 523713 | n/a | n/a | GAAAATCCCTGCTCAAGTGC | Intron 2 | 67 | 147262 | 147281 | 677 |
| 523714 | n/a | n/a | TGCCTGATATTGTAATTCTT | Intron 2 | 90 | 148062 | 148081 | 678 |

TABLE 11
Inhibition of GHR mRNA by 5-10-5 MOE gapmers targeting introns 1 and 2 of SEQ ID NO: 2

| | | | | SEQ | SEQ | |
|---|---|---|---|---|---|---|
| | | | | ID | ID | |
| | | | | NO: 2 | NO: 2 | SEQ |
| ISIS | | Target | % | Start | Stop | ID |
| NO | Sequence | Region | inhibition | Site | Site | NO |
| 532377 | CTCATACAGTGAAGTCTTCA | Intron 1 | 73 | 135431 | 135450 | 679 |
| 532378 | CTCACTAAGCTTGATTCACT | Intron 1 | 67 | 135818 | 135837 | 680 |
| 532379 | GATACAGAAATCCCAGTGAC | Intron 1 | 46 | 136111 | 136130 | 681 |
| 532380 | TGTGCTTGGGTGTACAGGCA | Intron 1 | 71 | 136282 | 136301 | 682 |
| 532381 | TCAAGCACTTACATCATATG | Intron 1 | 42 | 136377 | 136396 | 683 |
| 532382 | AGGGTTAGTTATTACACTTA | Intron 1 | 60 | 136576 | 136595 | 684 |
| 532383 | AGGCTTCATGTGAGGTAACA | Intron 1 | 58 | 136996 | 137015 | 685 |
| 532384 | TGAAAGCTTAGTACAAGAAG | Intron 1 | 51 | 138048 | 138067 | 686 |
| 532385 | CTCTCCTCTTGGAGATCCAG | Intron 1 | 58 | 138782 | 138801 | 687 |
| 532386 | GCTGAGATTTCTCTCCTCTT | Intron 1 | 78 | 138792 | 138811 | 688 |
| 532387 | CTTTTGCTGAGATTTCTCTC | Intron 1 | 58 | 138797 | 138816 | 689 |
| 532388 | GAACATATGTCCATAGAATG | Intron 1 | 57 | 141700 | 141719 | 690 |
| 532389 | GAACAGGCTATGTAATCAAA | Intron 1 | 68 | 143021 | 143040 | 691 |
| 532390 | TTTTTATTACTGTGCAAACC | Intron 1 | 41 | 143878 | 143897 | 692 |
| 532391 | ACTGAGGGTGGAAATGGAAA | Intron 2 | 23 | 145059 | 145078 | 693 |
| 532392 | ATGCCATACTTTTCATTTCA | Intron 2 | 87 | 146351 | 146370 | 694 |
| 532393 | TCTTTAAAGATTTCCTATGC | Intron 2 | 66 | 146367 | 146386 | 695 |
| 532394 | TCACAATTAAATTATGTTTA | Intron 2 | 47 | 149858 | 149877 | 696 |
| 532395 | TTTGCCATCACCAAACACCA | Intron 2 | 94 | 150972 | 150991 | 697 |
| 532396 | TCAGAATGCTGAAGGATGGG | Intron 2 | 70 | 152208 | 152227 | 698 |
| 532397 | ACAATTGCAGGAGAGAACTG | Intron 2 | 57 | 152296 | 152315 | 699 |
| 532398 | GTTCAGTCACCTGGAAAGAG | Intron 2 | 62 | 152549 | 152568 | 700 |
| 532399 | CGGAGTTCAGTCACCTGGAA | Intron 2 | 77 | 152553 | 152572 | 701 |
| 532400 | AATCTAAAGTTCAATGTCCA | Intron 2 | 77 | 152752 | 152771 | 702 |
| 532401 | CCACCTTTGGGTGAATAGCA | Intron 2 | 95 | 153921 | 153940 | 703 |
| 532402 | CAACATCAAAAGTTTCCACC | Intron 2 | 81 | 153936 | 153955 | 704 |
| 532403 | AAGCTTCTATCAACCAACTG | Intron 2 | 87 | 154093 | 154112 | 705 |
| 532404 | ACCATTTTCTAATAATTCAC | Intron 2 | 46 | 154502 | 154521 | 706 |
| 532405 | ACCTGCACTTGGACAACTGA | Intron 2 | 60 | 154727 | 154746 | 707 |
| 532406 | GTCAGTGCTTTGGTGATGTA | Intron 2 | 11 | 155283 | 155302 | 708 |
| 532407 | TAGAAGCACAGGAACTAGAG | Intron 2 | 68 | 155889 | 155908 | 709 |
| 532408 | TTTAATTTTATTAGAAGCAC | Intron 2 | 14 | 155900 | 155919 | 710 |
| 532409 | GAGCAAGAATTAAGAAAATC | Intron 2 | 29 | 155973 | 155992 | 711 |
| 532410 | CTCTGCAGTCATGTACACAA | Intron 2 | 93 | 156594 | 156613 | 712 |
| 532411 | GCTTGGTTTGTCAATCCTTT | Intron 2 | 95 | 156889 | 156908 | 713 |
| 532412 | GTTCTCAAGCAGGAGCCATT | Intron 2 | 70 | 157330 | 157349 | 714 |
| 532413 | AGGGTGATCTTCCAAAACAA | Intron 2 | 87 | 158612 | 158631 | 715 |
| 532414 | TCTCCTATGCTTCCTTTAAT | Intron 2 | 25 | 158813 | 158832 | 716 |
| 532415 | GACATAAATATGTTCACTGA | Intron 2 | 81 | 159216 | 159235 | 717 |
| 532416 | TTACTGAGTGACAGTACAGT | Intron 2 | 65 | 161588 | 161607 | 718 |
| 532417 | CCAGGCACCAGCACAGGCAC | Intron 2 | 47 | 161950 | 161969 | 719 |
| 532418 | TTAATGTCAGTAGAAAGCTG | Intron 2 | 0 | 162349 | 162368 | 720 |
| 532419 | GCAGGTGGAAAGAAGATGTC | Intron 2 | 50 | 162531 | 162550 | 721 |
| 532420 | GCCAGGGTCTTTACAAAGTT | Intron 2 | 93 | 162751 | 162770 | 722 |
| 532421 | CATTACCTTTGTACATGTAC | Intron 2 | 83 | 164839 | 164858 | 723 |
| 532422 | GAAGCAACTTCTCTGAGGTC | Intron 2 | 68 | 165040 | 165059 | 724 |
| 532423 | GCCTGGCAAGAAGGGCCCTT | Intron 2 | 56 | 165856 | 165875 | 725 |
| 532424 | ACACATGTTTTTAAATTTAT | Intron 2 | 21 | 166241 | 166260 | 726 |
| 532425 | TCACAATGCACTAAAAGAAA | Intron 2 | 53 | 168760 | 168779 | 727 |
| 532426 | TCCCAATGACTTACTGTAGA | Intron 2 | 78 | 169073 | 169092 | 728 |
| 532427 | TAAGCATTTATGGAGGAATG | Intron 2 | 46 | 169134 | 169153 | 729 |
| 532428 | TGAGGTGGGTGGCCAACAGG | Intron 2 | 66 | 170081 | 170100 | 730 |
| 532429 | GTTTTTCATTTTGATTGCAG | Intron 2 | 88 | 170158 | 170177 | 731 |
| 532430 | AGCTCAAGTGTTTTTCATTT | Intron 2 | 64 | 170167 | 170186 | 732 |
| 532431 | CAATGTCACAGCTGTTTCCT | Intron 2 | 62 | 170272 | 170291 | 733 |
| 532432 | GAACTTTGGAGGCTTTTAGA | Intron 2 | 55 | 170703 | 170722 | 734 |
| 532433 | TGTATGCCCCAAACTCCCAT | Intron 2 | 83 | 171431 | 171450 | 735 |
| 532434 | ACACAAATAAGGGAATAATA | Intron 2 | 24 | 171549 | 171568 | 736 |
| 532435 | TAGTTCAGCCACTATGGAAA | Intron 2 | 47 | 171926 | 171945 | 737 |
| 532436 | CTCCAAATTCCAGTCCTAGG | Intron 2 | 93 | 172746 | 172765 | 738 |
| 532437 | AGTTGGCACTGCTATATCAG | Intron 2 | 66 | 173668 | 173687 | 739 |
| 532438 | GGCCTTAGATTGTAAGTTTT | Intron 2 | 69 | 174122 | 174141 | 740 |
| 532439 | TTTTAGTATTATTGTAGGAA | Intron 2 | 16 | 174188 | 174207 | 741 |
| 532440 | TTTCATTAATGAAACCTGAT | Intron 2 | 39 | 174812 | 174831 | 742 |
| 532441 | CCCTCAGCTGCCTCTTCAAT | Intron 2 | 51 | 175014 | 175033 | 743 |
| 532442 | TATTGTATCCTGGCCCCTAA | Intron 2 | 68 | 175689 | 175708 | 744 |
| 532443 | AGAACAAGAGCCTAGAAGTA | Intron 2 | 35 | 176592 | 176611 | 745 |
| 532444 | GTGACTATGTCACTGAATTT | Intron 2 | 14 | 176918 | 176937 | 746 |
| 532445 | GCCCTACCCAGCAGCCTGTG | Intron 2 | 79 | 177540 | 177559 | 747 |
| 532446 | CAAACATAAAGAGAGTTCCA | Intron 2 | 79 | 177811 | 177830 | 748 |
| 532447 | CTTTAAATGAAGTAGAGCTC | Intron 2 | 0 | 178090 | 178109 | 749 |
| 532448 | CTGTTCAAAGAATGCAGGCC | Intron 2 | 70 | 178905 | 178924 | 750 |
| 532449 | GTCTAGCCTAACAGAGATAT | Intron 2 | 47 | 179137 | 179156 | 751 |
| 532450 | AAAGAGTGATGTCTAGCCTA | Intron 2 | 55 | 179147 | 179166 | 752 |
| 532451 | CACTTCTTACTCCTTTGAGG | Intron 2 | 50 | 179631 | 179650 | 753 |
| 532452 | TTCCACAAGAAACTCAGTTT | Intron 2 | 56 | 181514 | 181533 | 754 |
| 532453 | AGAAATGCCAAAGATAGCTC | Intron 2 | 56 | 182105 | 182124 | 755 |

TABLE 12
Inhibition of GHR mRNA by 5-10-5 MOE gapmers targeting intron 2 of SEQ ID NO: 2

| | | | SEQ | SEQ | |
|---|---|---|---|---|---|
| | | | ID | ID | |
| | | | NO: 2 | NO: 2 | SEQ |
| ISIS | | % | Start | Stop | ID |
| NO | Sequence | inhibition | Site | Site | NO |
| 533249 | AGCAGAGGATCTCAGCTGCA | 84 | 146241 | 146260 | 756 |
| 533250 | AATCCCTGCTCAAGTGCTAC | 75 | 147259 | 147278 | 757 |
| 533251 | AAATCCCTGCTCAAGTGCTA | 71 | 147260 | 147279 | 758 |
| 533252 | AAAATCCCTGCTCAAGTGCT | 73 | 147261 | 147280 | 759 |
| 533253 | AGAAAATCCCTGCTCAAGTG | 56 | 147263 | 147282 | 760 |
| 533254 | AAGAAAATCCCTGCTCAAGT | 58 | 147264 | 147283 | 761 |
| 533255 | CAAGAAAATCCCTGCTCAAG | 46 | 147265 | 147284 | 762 |
| 533256 | CTGATATTGTAATTCTTGGT | 91 | 148059 | 148078 | 763 |
| 533257 | CCTGATATTGTAATTCTTGG | 90 | 148060 | 148079 | 764 |
| 533258 | GCCTGATATTGTAATTCTTG | 94 | 148061 | 148080 | 765 |
| 533259 | ATGCCTGATATTGTAATTCT | 91 | 148063 | 148082 | 766 |
| 533260 | AATGCCTGATATTGTAATTC | 74 | 148064 | 148083 | 767 |
| 533261 | CAATGCCTGATATTGTAATT | 76 | 148065 | 148084 | 768 |
| 533262 | AATTATGTGCTTTGCCTGCA | 92 | 148904 | 148923 | 769 |
| 533263 | CAATTATGTGCTTTGCCTGC | 83 | 148905 | 148924 | 770 |
| 533264 | TCAATTATGTGCTTTGCCTG | 83 | 148906 | 148925 | 771 |
| 533265 | TGTCAATTATGTGCTTTGCC | 91 | 148908 | 148927 | 772 |
| 533266 | ATGTCAATTATGTGCTTTGC | 83 | 148909 | 148928 | 773 |
| 533267 | GATGTCAATTATGTGCTTTG | 74 | 148910 | 148929 | 774 |
| 533268 | CTGGTGACTCTGCCTGATGA | 77 | 151385 | 151404 | 775 |
| 533269 | GCTGGTGACTCTGCCTGATG | 87 | 151386 | 151405 | 776 |
| 533270 | TGCTGGTGACTCTGCCTGAT | 89 | 151387 | 151406 | 777 |
| 533271 | GCTGCTGGTGACTCTGCCTG | 94 | 151389 | 151408 | 778 |
| 533272 | GGCTGCTGGTGACTCTGCCT | 77 | 151390 | 151409 | 779 |
| 533273 | TGGCTGCTGGTGACTCTGCC | 82 | 151391 | 151410 | 780 |
| 533274 | GCTGAAGGATGGGCATCCAG | 85 | 152201 | 152220 | 781 |
| 533275 | TGCTGAAGGATGGGCATCCA | 85 | 152202 | 152221 | 782 |
| 533276 | ATGCTGAAGGATGGGCATCC | 78 | 152203 | 152222 | 783 |
| 533277 | GAATGCTGAAGGATGGGCAT | 66 | 152205 | 152224 | 784 |
| 533278 | AGAATGCTGAAGGATGGGCA | 81 | 152206 | 152225 | 785 |
| 533279 | CAGAATGCTGAAGGATGGGC | 85 | 152207 | 152226 | 786 |
| 533280 | TCCAGTAGTCAATATTATTT | 87 | 153001 | 153020 | 787 |
| 533281 | ATCCAGTAGTCAATATTATT | 85 | 153002 | 153021 | 788 |
| 533282 | TATCCAGTAGTCAATATTAT | 69 | 153003 | 153022 | 789 |
| 533283 | GTTATCCAGTAGTCAATATT | 77 | 153005 | 153024 | 790 |
| 533284 | GGTTATCCAGTAGTCAATAT | 85 | 153006 | 153025 | 791 |
| 533285 | TGGTTATCCAGTAGTCAATA | 86 | 153007 | 153026 | 792 |
| 533286 | CAACTTGAGGACAATAAGAG | 35 | 155591 | 155610 | 793 |
| 533287 | TCAACTTGAGGACAATAAGA | 62 | 155592 | 155611 | 794 |
| 533288 | CTCAACTTGAGGACAATAAG | 86 | 155593 | 155612 | 795 |
| 533289 | AACTCAACTTGAGGACAATA | 82 | 155595 | 155614 | 796 |
| 533290 | TAACTCAACTTGAGGACAAT | 66 | 155596 | 155615 | 797 |
| 533291 | ATAACTCAACTTGAGGACAA | 87 | 155597 | 155616 | 798 |
| 533292 | CAGGAAGAAAGGAACCTTAG | 77 | 156391 | 156410 | 799 |
| 533293 | CCAGGAAGAAAGGAACCTTA | 84 | 156392 | 156411 | 800 |
| 533294 | ACCAGGAAGAAAGGAACCTT | 86 | 156393 | 156412 | 801 |
| 533295 | AGACCAGGAAGAAAGGAACC | 74 | 156395 | 156414 | 802 |
| 533296 | TAGACCAGGAAGAAAGGAAC | 59 | 156396 | 156415 | 803 |
| 533297 | ATAGACCAGGAAGAAAGGAA | 65 | 156397 | 156416 | 804 |
| 533298 | TACAATGCACAGGACACGCC | 73 | 157198 | 157217 | 805 |
| 533299 | CTACAATGCACAGGACACGC | 85 | 157199 | 157218 | 806 |
| 533300 | GCTACAATGCACAGGACACG | 83 | 157200 | 157219 | 807 |
| 533301 | ATGCTACAATGCACAGGACA | 89 | 157202 | 157221 | 808 |
| 533302 | TATGCTACAATGCACAGGAC | 82 | 157203 | 157222 | 809 |
| 533303 | ATATGCTACAATGCACAGGA | 84 | 157204 | 157223 | 810 |
| 533304 | CTGATATTTATTGCTGTACG | 76 | 158006 | 158025 | 811 |
| 533305 | CTCTGATATTTATTGCTGTA | 80 | 158008 | 158027 | 812 |
| 533306 | TCTCTGATATTTATTGCTGT | 86 | 158009 | 158028 | 813 |
| 533307 | GTCTCTGATATTTATTGCTG | 80 | 158010 | 158029 | 814 |
| 533308 | CCAGAAGAATTACCCATGCA | 85 | 165550 | 165569 | 815 |
| 533309 | TCCAGAAGAATTACCCATGC | 84 | 165551 | 165570 | 816 |
| 533310 | TTCCAGAAGAATTACCCATG | 81 | 165552 | 165571 | 817 |
| 533311 | TCTTCCAGAAGAATTACCCA | 58 | 165554 | 165573 | 818 |
| 533312 | ATCTTCCAGAAGAATTACCC | 64 | 165555 | 165574 | 819 |
| 533313 | CATCTTCCAGAAGAATTACC | 58 | 165556 | 165575 | 820 |
| 533314 | TTTCTGCAGTATCCTAGCCT | 78 | 166350 | 166369 | 821 |
| 533315 | GTTTCTGCAGTATCCTAGCC | 88 | 166351 | 166370 | 822 |
| 533316 | AGTTTCTGCAGTATCCTAGC | 86 | 166352 | 166371 | 823 |
| 533317 | TCAGTTTCTGCAGTATCCTA | 88 | 166354 | 166373 | 824 |
| 533318 | TTCAGTTTCTGCAGTATCCT | 87 | 166355 | 166374 | 825 |
| 533319 | TTTCAGTTTCTGCAGTATCC | 80 | 166356 | 166375 | 826 |
| 533320 | GTTTCCATTTTCTTGATTCC | 70 | 169601 | 169620 | 827 |
| 533321 | TGTTTCCATTTTCTTGATTC | 54 | 169602 | 169621 | 828 |
| 533322 | GTGTTTCCATTTTCTTGATT | 55 | 169603 | 169622 | 829 |
| 533323 | TGGTGTTTCCATTTTCTTGA | 73 | 169605 | 169624 | 830 |
| 533324 | ATGGTGTTTCCATTTTCTTG | 76 | 169606 | 169625 | 831 |
| 533325 | AATGGTGTTTCCATTTTCTT | 78 | 169607 | 169626 | 832 |

TABLE 13
Inhibition of GHR mRNA by 5-10-5 MOE gapmers targeting introns 2 and 3 of SEQ ID NO: 2

| | | | | SEQ | SEQ | |
|---|---|---|---|---|---|---|
| | | | | ID | ID | |
| | | | | NO: 2 | NO: 2 | SEQ |
| ISIS | | Target | % | Start | Stop | ID |
| NO | Sequence | region | inhibition | Site | Site | NO |
| 533326 | AACCCATTTCATCCATTTAA | Intron 2 | 93 | 175369 | 175388 | 833 |
| 533327 | GAACCCATTTCATCCATTTA | Intron 2 | 83 | 175370 | 175389 | 834 |
| 533328 | GGAACCCATTTCATCCATTT | Intron 2 | 92 | 175371 | 175390 | 835 |
| 533329 | TAGGAACCCATTTCATCCAT | Intron 2 | 91 | 175373 | 175392 | 836 |
| 533330 | GTAGGAACCCATTTCATCCA | Intron 2 | 95 | 175374 | 175393 | 837 |
| 533331 | GGTAGGAACCCATTTCATCC | Intron 2 | 92 | 175375 | 175394 | 838 |
| 533332 | TGAGGGATTGCCTCAGTAGC | Intron 2 | 66 | 179616 | 179635 | 839 |
| 533333 | TTGAGGGATTGCCTCAGTAG | Intron 2 | 72 | 179617 | 179636 | 840 |
| 533334 | TTTGAGGGATTGCCTCAGTA | Intron 2 | 67 | 179618 | 179637 | 841 |
| 533335 | CCTTTGAGGGATTGCCTCAG | Intron 2 | 74 | 179620 | 179639 | 842 |
| 533336 | TCCTTTGAGGGATTGCCTCA | Intron 2 | 66 | 179621 | 179640 | 843 |
| 533337 | CTCCTTTGAGGGATTGCCTC | Intron 2 | 76 | 179622 | 179641 | 844 |
| 533338 | AACTTAGGACTTGGGACATT | Intron 2 | 64 | 184575 | 184594 | 845 |
| 533339 | TAACTTAGGACTTGGGACAT | Intron 2 | 54 | 184576 | 184595 | 846 |
| 533340 | CTAACTTAGGACTTGGGACA | Intron 2 | 63 | 184577 | 184596 | 847 |
| 533341 | CACTAACTTAGGACTTGGGA | Intron 2 | 82 | 184579 | 184598 | 848 |
| 533342 | TCACTAACTTAGGACTTGGG | Intron 2 | 77 | 184580 | 184599 | 849 |
| 533343 | GTCACTAACTTAGGACTTGG | Intron 2 | 83 | 184581 | 184600 | 850 |
| 533344 | TGGGCTAGATCAGGATTGGT | Intron 2 | 81 | 188617 | 188636 | 851 |
| 533345 | ATGGGCTAGATCAGGATTGG | Intron 2 | 70 | 188618 | 188637 | 852 |
| 533346 | CATGGGCTAGATCAGGATTG | Intron 2 | 64 | 188619 | 188638 | 853 |
| 533347 | ACCATGGGCTAGATCAGGAT | Intron 2 | 82 | 188621 | 188640 | 854 |
| 533348 | TACCATGGGCTAGATCAGGA | Intron 2 | 88 | 188622 | 188641 | 855 |
| 533349 | CTACCATGGGCTAGATCAGG | Intron 2 | 87 | 188623 | 188642 | 856 |
| 533350 | ATGAGCTTAGCAGTCACTTA | Intron 2 | 83 | 189482 | 189501 | 857 |
| 533351 | CATGAGCTTAGCAGTCACTT | Intron 2 | 87 | 189483 | 189502 | 858 |
| 533352 | CCATGAGCTTAGCAGTCACT | Intron 2 | 92 | 189484 | 189503 | 859 |
| 533353 | GTCTCAGCAAACCTGGGATA | Intron 2 | 84 | 190283 | 190302 | 860 |
| 533354 | TGTCTCAGCAAACCTGGGAT | Intron 2 | 82 | 190284 | 190303 | 861 |
| 533355 | ATGTCTCAGCAAACCTGGGA | Intron 2 | 81 | 190285 | 190304 | 862 |
| 533356 | GAATGTCTCAGCAAACCTGG | Intron 2 | 76 | 190287 | 190306 | 863 |
| 533357 | GGAATGTCTCAGCAAACCTG | Intron 2 | 82 | 190288 | 190307 | 864 |
| 533358 | AGGAATGTCTCAGCAAACCT | Intron 2 | 85 | 190289 | 190308 | 865 |
| 533359 | TACAGACATAGCTCTAACCT | Intron 2 | 79 | 191139 | 191158 | 866 |
| 533360 | ATACAGACATAGCTCTAACC | Intron 2 | 79 | 191140 | 191159 | 867 |
| 533361 | GATACAGACATAGCTCTAAC | Intron 2 | 71 | 191141 | 191160 | 868 |
| 533362 | TGGATACAGACATAGCTCTA | Intron 2 | 79 | 191143 | 191162 | 869 |
| 533363 | CTGGATACAGACATAGCTCT | Intron 2 | 82 | 191144 | 191163 | 870 |
| 533364 | GCTGGATACAGACATAGCTC | Intron 2 | 95 | 191145 | 191164 | 871 |
| 533365 | ACACTGTTTGTGAGGGTCAA | Intron 2 | 87 | 191939 | 191958 | 872 |
| 533366 | AACACTGTTTGTGAGGGTCA | Intron 2 | 81 | 191940 | 191959 | 873 |
| 533367 | CAACACTGTTTGTGAGGGTC | Intron 2 | 85 | 191941 | 191960 | 874 |
| 533368 | AACAACACTGTTTGTGAGGG | Intron 2 | 65 | 191943 | 191962 | 875 |
| 533369 | AAACAACACTGTTTGTGAGG | Intron 2 | 76 | 191944 | 191963 | 876 |
| 533370 | CAAACAACACTGTTTGTGAG | Intron 2 | 67 | 191945 | 191964 | 877 |
| 533371 | TTCAAGTTTAGGATCTGCAG | Intron 2 | 73 | 196536 | 196555 | 878 |
| 533372 | CTTCAAGTTTAGGATCTGCA | Intron 2 | 88 | 196537 | 196556 | 879 |
| 533373 | GCTTCAAGTTTAGGATCTGC | Intron 2 | 86 | 196538 | 196557 | 880 |
| 533374 | GGGCTTCAAGTTTAGGATCT | Intron 2 | 67 | 196540 | 196559 | 881 |
| 533375 | AGGGCTTCAAGTTTAGGATC | Intron 2 | 66 | 196541 | 196560 | 882 |
| 533376 | CAGGGCTTCAAGTTTAGGAT | Intron 2 | 74 | 196542 | 196561 | 883 |
| 533377 | TGTGGCTTTAATTCACTAAT | Intron 2 | 84 | 198145 | 198164 | 884 |
| 533378 | ATGTGGCTTTAATTCACTAA | Intron 2 | 86 | 198146 | 198165 | 885 |
| 533379 | TATGTGGCTTTAATTCACTA | Intron 2 | 79 | 198147 | 198166 | 886 |
| 533380 | GGTATGTGGCTTTAATTCAC | Intron 2 | 83 | 198149 | 198168 | 887 |
| 533381 | TGGTATGTGGCTTTAATTCA | Intron 2 | 81 | 198150 | 198169 | 888 |
| 533382 | GTGGTATGTGGCTTTAATTC | Intron 2 | 86 | 198151 | 198170 | 889 |
| 533383 | TCTGTGTTCAGTTGCATCAC | Intron 2 | 75 | 199817 | 199836 | 890 |
| 533384 | TTCTGTGTTCAGTTGCATCA | Intron 2 | 82 | 199818 | 199837 | 891 |
| 533385 | GTTCTGTGTTCAGTTGCATC | Intron 2 | 86 | 199819 | 199838 | 892 |
| 533386 | GTACTCATGAGGAGGCACTT | Intron 2 | 81 | 201413 | 201432 | 893 |
| 533387 | GGTACTCATGAGGAGGCACT | Intron 2 | 82 | 201414 | 201433 | 894 |
| 533388 | TGGTACTCATGAGGAGGCAC | Intron 2 | 78 | 201415 | 201434 | 895 |
| 533389 | ATTGGTACTCATGAGGAGGC | Intron 2 | 64 | 201417 | 201436 | 896 |
| 533390 | AATTGGTACTCATGAGGAGG | Intron 2 | 47 | 201418 | 201437 | 897 |
| 533391 | CAATTGGTACTCATGAGGAG | Intron 2 | 54 | 201419 | 201438 | 898 |
| 533392 | AAACTCTGCAACTCCAACCC | Intron 2 | 69 | 205549 | 205568 | 899 |
| 533393 | GAAACTCTGCAACTCCAACC | Intron 2 | 64 | 205550 | 205569 | 900 |
| 533394 | GGAAACTCTGCAACTCCAAC | Intron 2 | 83 | 205551 | 205570 | 901 |
| 533395 | ATGGAAACTCTGCAACTCCA | Intron 2 | 88 | 205553 | 205572 | 902 |
| 533396 | CATGGAAACTCTGCAACTCC | Intron 2 | 70 | 205554 | 205573 | 903 |
| 533397 | TCATGGAAACTCTGCAACTC | Intron 2 | 69 | 205555 | 205574 | 904 |
| 533398 | ACATCTGGATGTGAGGCTCG | Intron 3 | 64 | 210559 | 210578 | 905 |
| 533399 | CACATCTGGATGTGAGGCTC | Intron 3 | 84 | 210560 | 210579 | 906 |
| 533400 | GTCACATCTGGATGTGAGGC | Intron 3 | 75 | 210562 | 210581 | 907 |
| 533401 | TGTCACATCTGGATGTGAGG | Intron 3 | 51 | 210563 | 210582 | 908 |
| 533402 | CTGTCACATCTGGATGTGAG | Intron 3 | 30 | 210564 | 210583 | 909 |

TABLE 14
Inhibition of GHR mRNA by 5-10-5 MOE gapmers targeting introns 2 and 3 of SEQ ID NO: 2

| | | | | SEQ | | |
|---|---|---|---|---|---|---|
| | | | | ID | SEQ ID | |
| | | | | NO: 2 | NO: 2 | SEQ |
| ISIS | | Target | % | Start | Stop | ID |
| NO | Sequence | region | inhibition | Site | Site | NO |
| 523715 | GTCAATTATGTGCTTTGCCT | Intron 2 | 91 | 148907 | 148926 | 910 |
| 523716 | ACATTCAAAATTCTTCCTTG | Intron 2 | 50 | 149787 | 149806 | 911 |
| 523717 | ATCCTGCATATATTTTATTG | Intron 2 | 20 | 150588 | 150607 | 912 |
| 523718 | CTGCTGGTGACTCTGCCTGA | Intron 2 | 77 | 151388 | 151407 | 913 |
| 523719 | AATGCTGAAGGATGGGCATC | Intron 2 | 66 | 152204 | 152223 | 914 |
| 523720 | TTATCCAGTAGTCAATATTA | Intron 2 | 71 | 153004 | 153023 | 915 |
| 523721 | TCTCATGTTAAAGTTCTTAA | Intron 2 | 48 | 153831 | 153850 | 916 |
| 523722 | TGCACTTGGACAACTGATAG | Intron 2 | 29 | 154724 | 154743 | 917 |
| 523723 | ACTCAACTTGAGGACAATAA | Intron 2 | 88 | 155594 | 155613 | 918 |
| 523724 | GACCAGGAAGAAAGGAACCT | Intron 2 | 72 | 156394 | 156413 | 919 |
| 523725 | TGCTACAATGCACAGGACAC | Intron 2 | 80 | 157201 | 157220 | 920 |
| 523726 | TCTGATATTTATTGCTGTAC | Intron 2 | 73 | 158007 | 158026 | 921 |
| 523727 | ATGCTTCCTTTAATAAATGT | Intron 2 | 0 | 158807 | 158826 | 922 |
| 523728 | AACATTTAGAACCTAGGAGA | Intron 2 | 20 | 159610 | 159629 | 923 |
| 523729 | CAAGCTTGCAAGTAGGAAAA | Intron 2 | 51 | 160410 | 160429 | 924 |
| 523730 | CCAGGCTGTTCATGCCAAGG | Intron 2 | 26 | 161248 | 161267 | 925 |
| 523731 | CCTGCCAAGGGCAAGCCAGG | Intron 2 | 17 | 162064 | 162083 | 926 |
| 523732 | TTTCACCTGGTGACTGGAAG | Intron 2 | 51 | 163019 | 163038 | 927 |
| 523733 | ATTTTCTACCATCAAAGAGA | Intron 2 | 4 | 163943 | 163962 | 928 |
| 523734 | GATTAAGTTTTCTTTAAAAA | Intron 2 | 0 | 164746 | 164765 | 929 |
| 523735 | CTTCCAGAAGAATTACCCAT | Intron 2 | 56 | 165553 | 165572 | 930 |
| 523736 | CAGTTTCTGCAGTATCCTAG | Intron 2 | 77 | 166353 | 166372 | 931 |
| 523737 | TATTTTGAAAATGAGATTCA | Intron 2 | 0 | 167195 | 167214 | 932 |
| 523738 | GTGGCCCGAGTAAAGATAAA | Intron 2 | 21 | 167995 | 168014 | 933 |
| 523739 | CCTGTCAATCCTCTTATATG | Intron 2 | 37 | 168804 | 168823 | 934 |
| 523740 | GGTGTTTCCATTTTCTTGAT | Intron 2 | 65 | 169604 | 169623 | 935 |
| 523741 | ACAGGGTCAAAAGTTCACTT | Intron 2 | 44 | 170407 | 170426 | 936 |
| 523742 | TAGGAAAGCTGAGAGAATCC | Intron 2 | 35 | 171207 | 171226 | 937 |
| 523743 | AGCATATGAAAAAATACTCA | Intron 2 | 0 | 172101 | 172120 | 938 |
| 523744 | CTTCAGAAATCAGCATCTGA | Intron 2 | 45 | 172937 | 172956 | 939 |
| 523745 | TTACAAGTGACAGTGTTTGT | Intron 2 | 28 | 173737 | 173756 | 940 |
| 523746 | ATCAGACCCTGAAGAATTTA | Intron 2 | 29 | 174560 | 174579 | 941 |
| 523747 | AGGAACCCATTTCATCCATT | Intron 2 | 83 | 175372 | 175391 | 942 |
| 523748 | CACATTGGTAACTTAAAGTT | Intron 2 | 18 | 176263 | 176282 | 943 |
| 523749 | TATTATCTGACTCATTTCTG | Intron 2 | 16 | 177072 | 177091 | 944 |
| 523750 | AAATAAGACAAAGAAAATTC | Intron 2 | 0 | 177872 | 177891 | 945 |
| 523751 | TTTTAAAAATAACCAATTCA | Intron 2 | 0 | 178788 | 178807 | 946 |
| 523752 | CTTTGAGGGATTGCCTCAGT | Intron 2 | 66 | 179619 | 179638 | 947 |
| 523753 | ACAGTCCTCATGAACAGATT | Intron 2 | 37 | 180513 | 180532 | 948 |
| 523754 | ACTATCATTAATAATATTGT | Intron 2 | 0 | 181323 | 181342 | 949 |
| 523755 | ATCTAGATTTGCCTTATAAG | Intron 2 | 27 | 182123 | 182142 | 950 |
| 523756 | TGGTTGAGGAAGACAGTCTC | Intron 2 | 16 | 182962 | 182981 | 951 |
| 523757 | TGGCTCATAACTTCCTTAGC | Intron 2 | 43 | 183762 | 183781 | 952 |
| 523758 | ACTAACTTAGGACTTGGGAC | Intron 2 | 72 | 184578 | 184597 | 953 |
| 523759 | CTTATAGCATTACTAAGTGG | Intron 2 | 49 | 185403 | 185422 | 954 |
| 523760 | TGGTGGCAGGAGAGAGGGAA | Intron 2 | 48 | 186203 | 186222 | 955 |
| 523761 | TTTGCCAGGAAATCTTGAAA | Intron 2 | 35 | 187003 | 187022 | 956 |
| 523762 | ATAACTTTTCTCTGAAATTT | Intron 2 | 8 | 187803 | 187822 | 957 |
| 523763 | CCATGGGCTAGATCAGGATT | Intron 2 | 59 | 188620 | 188639 | 958 |
| 523764 | TGAGCTTAGCAGTCACTTAG | Intron 2 | 62 | 189481 | 189500 | 959 |
| 523765 | AATGTCTCAGCAAACCTGGG | Intron 2 | 62 | 190286 | 190305 | 960 |
| 523766 | GGATACAGACATAGCTCTAA | Intron 2 | 75 | 191142 | 191161 | 961 |
| 523767 | ACAACACTGTTTGTGAGGGT | Intron 2 | 66 | 191942 | 191961 | 962 |
| 523768 | TCTATTTTCTAATAGCTGTT | Intron 2 | 49 | 192742 | 192761 | 963 |
| 523769 | GGCCCCACCTCTGACCTTCA | Intron 2 | 7 | 193542 | 193561 | 964 |
| 523770 | TGGTAAAGCTAGAAAAAAAA | Intron 2 | 0 | 194346 | 194365 | 965 |
| 523771 | AAGTGGTAAATATGATCACA | Intron 2 | 23 | 195159 | 195178 | 966 |
| 523772 | GGCTTCAAGTTTAGGATCTG | Intron 2 | 52 | 196539 | 196558 | 967 |
| 523773 | TTGTTGACACTCTCTTTTGG | Intron 2 | 18 | 197348 | 197367 | 968 |
| 523774 | GTATGTGGCTTTAATTCACT | Intron 2 | 71 | 198148 | 198167 | 969 |
| 523775 | AATTAGTTGTTTTGGCAAAT | Intron 2 | 14 | 198988 | 199007 | 970 |
| 523776 | CTGTGTTCAGTTGCATCACG | Intron 2 | 75 | 199816 | 199835 | 971 |
| 523777 | AATGTGGAAGTTTCCTAACA | Intron 2 | 15 | 200616 | 200635 | 972 |
| 523778 | TTGGTACTCATGAGGAGGCA | Intron 2 | 58 | 201416 | 201435 | 973 |
| 523779 | TTTCTCTGTGTTTAAAATTG | Intron 2 | 13 | 202308 | 202327 | 974 |
| 523780 | GTAAAGCACAATGAACAAAA | Intron 2 | 21 | 203115 | 203134 | 975 |
| 523781 | ATCACAGATCTTTGCTACAA | Intron 2 | 51 | 203915 | 203934 | 976 |
| 523782 | TCCTGCCTTTCTGAACCAAA | Intron 2 | 50 | 204721 | 204740 | 977 |
| 523783 | TGGAAACTCTGCAACTCCAA | Intron 2 | 58 | 205552 | 205571 | 978 |
| 523784 | ACACAGTAGGGAACAATTTT | Intron 2 | 8 | 206412 | 206431 | 979 |
| 523785 | AGACAGATGGTGAAATGATG | Intron 2 | 0 | 207219 | 207238 | 980 |
| 523786 | AAACAGAAAGAGAAGAAAAC | Intron 2 | 0 | 208117 | 208136 | 981 |
| 523787 | CTTAGATAAATACTTCAAGA | Intron 3 | 0 | 208938 | 208957 | 982 |
| 523788 | AGCCACTTCTTTTACAACCT | Intron 3 | 0 | 209742 | 209761 | 983 |
| 523789 | TCACATCTGGATGTGAGGCT | Intron 3 | 80 | 210561 | 210580 | 984 |
| 523790 | GACTGAAACTTAAAGGTGGG | Intron 3 | 7 | 211399 | 211418 | 985 |
| 523791 | AAAGATGTGCAATCATCTAA | Intron 3 | 44 | 212204 | 212223 | 986 |

TABLE 15
Inhibition of GHR mRNA by 3-10-4 MOE gapmers targeting
introns 2 and 3 of SEQ ID NO: 2

| | | | | SEQ | SEQ | |
|---|---|---|---|---|---|---|
| | | | | ID NO: | ID NO: | SEQ |
| ISIS | | Target | % | 2 Start | 2 Stop | ID |
| NO | Sequence | region | inhibition | Site | Site | NO |
| 539360 | GCTGGTGACTCTGCCTG | Intron 2 | 95 | 151389 | 151405 | 987 |
| 539361 | TGCTGGTGACTCTGCCT | Intron 2 | 95 | 151390 | 151406 | 988 |
| 539362 | CTGCTGGTGACTCTGCC | Intron 2 | 93 | 151391 | 151407 | 989 |
| 539363 | AGTAGTCAATATTATTT | Intron 2 | 31 | 153001 | 153017 | 990 |
| 539364 | CAGTAGTCAATATTATT | Intron 2 | 13 | 153002 | 153018 | 991 |
| 539365 | CCAGTAGTCAATATTAT | Intron 2 | 34 | 153003 | 153019 | 992 |
| 539366 | CCTTTGGGTGAATAGCA | Intron 2 | 64 | 153921 | 153937 | 993 |
| 539367 | ACCTTTGGGTGAATAGC | Intron 2 | 78 | 153922 | 153938 | 994 |
| 539368 | CACCTTTGGGTGAATAG | Intron 2 | 40 | 153923 | 153939 | 995 |
| 539369 | CAACTTGAGGACAATAA | Intron 2 | 38 | 155594 | 155610 | 996 |
| 539370 | TCAACTTGAGGACAATA | Intron 2 | 63 | 155595 | 155611 | 997 |
| 539371 | CTCAACTTGAGGACAAT | Intron 2 | 81 | 155596 | 155612 | 998 |
| 539372 | CAGGAAGAAAGGAACCT | Intron 2 | 70 | 156394 | 156410 | 999 |
| 539373 | CCAGGAAGAAAGGAACC | Intron 2 | 59 | 156395 | 156411 | 1000 |
| 539374 | ACCAGGAAGAAAGGAAC | Intron 2 | 43 | 156396 | 156412 | 1001 |
| 539375 | TGCAGTCATGTACACAA | Intron 2 | 93 | 156594 | 156610 | 1002 |
| 539376 | CTGCAGTCATGTACACA | Intron 2 | 91 | 156595 | 156611 | 1003 |
| 539377 | TCTGCAGTCATGTACAC | Intron 2 | 87 | 156596 | 156612 | 1004 |
| 539378 | TGGTTTGTCAATCCTTT | Intron 2 | 95 | 156889 | 156905 | 1005 |
| 539379 | TTGGTTTGTCAATCCTT | Intron 2 | 97 | 156890 | 156906 | 1006 |
| 539380 | CTTGGTTTGTCAATCCT | Intron 2 | 97 | 156891 | 156907 | 1007 |
| 539381 | TACAATGCACAGGACAC | Intron 2 | 65 | 157201 | 157217 | 1008 |
| 539382 | CTACAATGCACAGGACA | Intron 2 | 85 | 157202 | 157218 | 1009 |
| 539383 | GCTACAATGCACAGGAC | Intron 2 | 96 | 157203 | 157219 | 1010 |
| 539384 | GATATTTATTGCTGTAC | Intron 2 | 43 | 158007 | 158023 | 1011 |
| 539385 | TGATATTTATTGCTGTA | Intron 2 | 35 | 158008 | 158024 | 1012 |
| 539386 | CTGATATTTATTGCTGT | Intron 2 | 38 | 158009 | 158025 | 1013 |
| 539387 | AGGGTCTTTACAAAGTT | Intron 2 | 61 | 162751 | 162767 | 1014 |
| 539388 | CAGGGTCTTTACAAAGT | Intron 2 | 65 | 162752 | 162768 | 1015 |
| 539389 | CCAGGGTCTTTACAAAG | Intron 2 | 88 | 162753 | 162769 | 1016 |
| 539390 | TTCTGCAGTATCCTAGC | Intron 2 | 72 | 166352 | 166368 | 1017 |
| 539391 | TTTCTGCAGTATCCTAG | Intron 2 | 53 | 166353 | 166369 | 1018 |
| 539392 | GTTTCTGCAGTATCCTA | Intron 2 | 84 | 166354 | 166370 | 1019 |
| 539393 | AGTTTCTGCAGTATCCT | Intron 2 | 78 | 166355 | 166371 | 1020 |
| 539394 | CAGTTTCTGCAGTATCC | Intron 2 | 77 | 166356 | 166372 | 1021 |
| 539395 | CAAATTCCAGTCCTAGG | Intron 2 | 60 | 172746 | 172762 | 1022 |
| 539396 | CCAAATTCCAGTCCTAG | Intron 2 | 75 | 172747 | 172763 | 1023 |
| 539397 | TCCAAATTCCAGTCCTA | Intron 2 | 62 | 172748 | 172764 | 1024 |
| 539398 | AACCCATTTCATCCATT | Intron 2 | 82 | 175372 | 175388 | 1025 |
| 539399 | GAACCCATTTCATCCAT | Intron 2 | 86 | 175373 | 175389 | 1026 |
| 539400 | GGAACCCATTTCATCCA | Intron 2 | 84 | 175374 | 175390 | 1027 |
| 539401 | GCTTCATGTCTTTCTAG | Intron 2 | 88 | 189119 | 189135 | 1028 |
| 539402 | TGCTTCATGTCTTTCTA | Intron 2 | 77 | 189120 | 189136 | 1029 |
| 539403 | GTGCTTCATGTCTTTCT | Intron 2 | 95 | 189121 | 189137 | 1030 |
| 539404 | TGAGCTTAGCAGTCACT | Intron 2 | 92 | 189484 | 189500 | 1031 |
| 539405 | CATGAGCTTAGCAGTCA | Intron 2 | 82 | 189486 | 189502 | 1032 |
| 539406 | TACAGACATAGCTCTAA | Intron 2 | 45 | 191142 | 191158 | 1033 |
| 539407 | ATACAGACATAGCTCTA | Intron 2 | 53 | 191143 | 191159 | 1034 |
| 539408 | GATACAGACATAGCTCT | Intron 2 | 67 | 191144 | 191160 | 1035 |
| 539409 | TGTGGCTTTAATTCACT | Intron 2 | 70 | 198148 | 198164 | 1036 |
| 539410 | ATGTGGCTTTAATTCAC | Intron 2 | 40 | 198149 | 198165 | 1037 |
| 539411 | TATGTGGCTTTAATTCA | Intron 2 | 35 | 198150 | 198166 | 1038 |
| 539412 | TGTTCAGTTGCATCACG | Intron 2 | 84 | 199816 | 199832 | 1039 |
| 539413 | GTGTTCAGTTGCATCAC | Intron 2 | 80 | 199817 | 199833 | 1040 |
| 539414 | TGTGTTCAGTTGCATCA | Intron 2 | 74 | 199818 | 199834 | 1041 |
| 539415 | CATCTGGATGTGAGGCT | Intron 3 | 82 | 210561 | 210577 | 1042 |
| 539416 | ACATCTGGATGTGAGGC | Intron 3 | 86 | 210562 | 210578 | 1043 |
| 539417 | CACATCTGGATGTGAGG | Intron 3 | 55 | 210563 | 210579 | 1044 |
| 539418 | TCAGGTAATTTCTGGAA | Intron 3 | 35 | 219019 | 219035 | 1045 |
| 539419 | CTCAGGTAATTTCTGGA | Intron 3 | 44 | 219020 | 219036 | 1046 |
| 539420 | TCTCAGGTAATTTCTGG | Intron 3 | 31 | 219021 | 219037 | 1047 |
| 539421 | TTGCTTATTTACCTGGG | Intron 3 | 0 | 225568 | 225584 | 1048 |
| 539422 | TTTGCTTATTTACCTGG | Intron 3 | 38 | 225569 | 225585 | 1049 |
| 539423 | TTTTGCTTATTTACCTG | Intron 3 | 33 | 225570 | 225586 | 1050 |
| 539424 | ATGATGTTACTACTACT | Intron 3 | 29 | 229618 | 229634 | 1051 |
| 539425 | AATGATGTTACTACTAC | Intron 3 | 10 | 229619 | 229635 | 1052 |
| 539426 | CAATGATGTTACTACTA | Intron 3 | 0 | 229620 | 229636 | 1053 |
| 539427 | CCCCTAGAGCAATGGTC | Intron 3 | 67 | 232826 | 232842 | 1054 |
| 539428 | CCCCCTAGAGCAATGGT | Intron 3 | 65 | 232827 | 232843 | 1055 |
| 539429 | TCCCCCTAGAGCAATGG | Intron 3 | 45 | 232828 | 232844 | 1056 |
| 539430 | TCAATTGCAGATGCTCT | Intron 3 | 78 | 237675 | 237691 | 1057 |
| 539431 | CTCAATTGCAGATGCTC | Intron 3 | 82 | 237676 | 237692 | 1058 |
| 539432 | GCTCAATTGCAGATGCT | Intron 3 | 92 | 237677 | 237693 | 1059 |
| 539433 | AGCTCAATTGCAGATGC | Intron 3 | 85 | 237678 | 237694 | 1060 |
| 539434 | GTATATTCAGTCCAAGG | Intron 3 | 73 | 248231 | 248247 | 1061 |
| 539435 | AGTATATTCAGTCCAAG | Intron 3 | 70 | 248232 | 248248 | 1062 |
| 539436 | CAGTATATTCAGTCCAA | Intron 3 | 40 | 248233 | 248249 | 1063 |

TABLE 16
Inhibition of GHR mRNA by 5-10-5 MOE gapmers targeting
introns 1 and 3 of SEQ ID NO: 2

| | | | | SEQ | SEQ | |
|---|---|---|---|---|---|---|
| | | | | ID | ID | |
| | | | | NO: 2 | NO: 2 | SEQ |
| ISIS | | Target | % | Start | Stop | ID |
| NO | Sequence | region | inhibition | Site | Site | NO |
| 532502 | GAGTATTTCAGGCTGGAAAA | Intron 3 | 43 | 214623 | 214642 | 1064 |
| 533404 | GTAACTCAGGAATGGAAAAC | Intron 1 | 56 | 26501 | 26520 | 1065 |
| | | | | 113035 | 113054 | |
| | | | | 121992 | 122011 | |
| 533405 | AGTAACTCAGGAATGGAAAA | Intron 1 | 41 | 26502 | 26521 | 1066 |
| | | | | 113036 | 113055 | |
| | | | | 121993 | 122012 | |
| 533406 | AAGTAACTCAGGAATGGAAA | Intron 1 | 43 | 26503 | 26522 | 1067 |
| | | | | 113037 | 113056 | |
| | | | | 121994 | 122013 | |
| 533407 | GAGATTTCAAATAAATCTCA | Intron 1 | 0 | 143207 | 143226 | 1068 |
| | | | | 143235 | 143254 | |
| | | | | 143263 | 143282 | |
| | | | | 143291 | 143310 | |
| | | | | 143319 | 143338 | |
| | | | | 143347 | 143366 | |
| | | | | 143375 | 143394 | |
| | | | | 143403 | 143422 | |
| | | | | 143431 | 143450 | |
| | | | | 143459 | 143478 | |
| 533408 | TGAGATTTCAAATAAATCTC | Intron 1 | 11 | 143208 | 143227 | 1069 |
| | | | | 143236 | 143255 | |
| | | | | 143264 | 143283 | |
| | | | | 143292 | 143311 | |
| | | | | 143320 | 143339 | |
| | | | | 143348 | 143367 | |
| | | | | 143376 | 143395 | |
| | | | | 143404 | 143423 | |
| | | | | 143432 | 143451 | |
| | | | | 143460 | 143479 | |
| 533409 | GTGAGATTTCAAATAAATCT | Intron 1 | 0 | 143209 | 143228 | 1070 |
| | | | | 143237 | 143256 | |
| | | | | 143265 | 143284 | |
| | | | | 143293 | 143312 | |
| | | | | 143321 | 143340 | |
| | | | | 143349 | 143368 | |
| | | | | 143377 | 143396 | |
| | | | | 143405 | 143424 | |
| | | | | 143433 | 143452 | |
| | | | | 143461 | 143480 | |
| 533410 | TGTGAGATTTCAAATAAATC | Intron 1 | 0 | 143210 | 143229 | 1071 |
| | | | | 143238 | 143257 | |
| | | | | 143266 | 143285 | |
| | | | | 143294 | 143313 | |
| | | | | 143322 | 143341 | |
| | | | | 143350 | 143369 | |
| | | | | 143378 | 143397 | |
| | | | | 143406 | 143425 | |
| | | | | 143434 | 143453 | |
| | | | | 143462 | 143481 | |
| 533411 | TTGTGAGATTTCAAATAAAT | Intron 1 | 10 | 143183 | 143202 | 1072 |
| | | | | 143211 | 143230 | |
| | | | | 143239 | 143258 | |
| | | | | 143267 | 143286 | |
| | | | | 143295 | 143314 | |
| | | | | 143323 | 143342 | |
| | | | | 143351 | 143370 | |
| | | | | 143379 | 143398 | |
| | | | | 143407 | 143426 | |
| | | | | 143435 | 143454 | |
| | | | | 143463 | 143482 | |
| 533412 | TTTGTGAGATTTCAAATAAA | Intron 1 | 0 | 143184 | 143203 | 1073 |
| | | | | 143212 | 143231 | |
| | | | | 143240 | 143259 | |
| | | | | 143296 | 143315 | |
| | | | | 143324 | 143343 | |
| | | | | 143352 | 143371 | |
| | | | | 143380 | 143399 | |
| | | | | 143464 | 143483 | |
| 533413 | CTTTGTGAGATTTCAAATAA | Intron 1 | 20 | 143185 | 143204 | 1074 |
| | | | | 143213 | 143232 | |
| | | | | 143241 | 143260 | |
| | | | | 143297 | 143316 | |
| | | | | 143325 | 143344 | |
| | | | | 143353 | 143372 | |
| | | | | 143381 | 143400 | |
| | | | | 143465 | 143484 | |
| 533414 | ACTTTGTGAGATTTCAAATA | Intron 1 | 57 | 143186 | 143205 | 1075 |
| | | | | 143214 | 143233 | |
| | | | | 143242 | 143261 | |
| | | | | 143298 | 143317 | |
| | | | | 143326 | 143345 | |
| | | | | 143354 | 143373 | |
| | | | | 143382 | 143401 | |
| | | | | 143466 | 143485 | |
| 533415 | CACTTTGTGAGATTTCAAAT | Intron 1 | 69 | 143187 | 143206 | 1076 |
| | | | | 143215 | 143234 | |
| | | | | 143243 | 143262 | |
| | | | | 143299 | 143318 | |
| | | | | 143327 | 143346 | |
| | | | | 143355 | 143374 | |
| | | | | 143383 | 143402 | |
| | | | | 143467 | 143486 | |
| 533895 | AGTATTTCAGGCTGGAAAAA | Intron 3 | 35 | 214622 | 214641 | 1077 |
| 533896 | TGAGTATTTCAGGCTGGAAA | Intron 3 | 55 | 214624 | 214643 | 1078 |
| 533897 | TCTGAGTATTTCAGGCTGGA | Intron 3 | 71 | 214626 | 214645 | 1079 |
| 533898 | ATCTGAGTATTTCAGGCTGG | Intron 3 | 77 | 214627 | 214646 | 1080 |
| 533899 | TATCTGAGTATTTCAGGCTG | Intron 3 | 58 | 214628 | 214647 | 1081 |
| 533900 | TTTTGTGTTATGCCTTGAGG | Intron 3 | 51 | 221483 | 221502 | 1082 |
| 533901 | TTTTTGTGTTATGCCTTGAG | Intron 3 | 55 | 221484 | 221503 | 1083 |
| 533902 | ATTTTTGTGTTATGCCTTGA | Intron 3 | 57 | 221485 | 221504 | 1084 |
| 533903 | ATATTTTTGTGTTATGCCTT | Intron 3 | 56 | 221487 | 221506 | 1085 |
| 533904 | AATATTTTTGTGTTATGCCT | Intron 3 | 61 | 221488 | 221507 | 1086 |
| 533905 | AAATATTTTTGTGTTATGCC | Intron 3 | 18 | 221489 | 221508 | 1087 |
| 533906 | TTGCTTATTTACCTGGGTAA | Intron 3 | 58 | 225565 | 225584 | 1088 |
| 533907 | TTTGCTTATTTACCTGGGTA | Intron 3 | 64 | 225566 | 225585 | 1089 |
| 533908 | TTTTGCTTATTTACCTGGGT | Intron 3 | 77 | 225567 | 225586 | 1090 |
| 533909 | CCTTTTGCTTATTTACCTGG | Intron 3 | 69 | 225569 | 225588 | 1091 |
| 533910 | GCCTTTTGCTTATTTACCTG | Intron 3 | 69 | 225570 | 225589 | 1092 |
| 533911 | TGCCTTTTGCTTATTTACCT | Intron 3 | 55 | 225571 | 225590 | 1093 |
| 533912 | ATGATGTTACTACTACTCAA | Intron 3 | 60 | 229615 | 229634 | 1094 |
| 533913 | AATGATGTTACTACTACTCA | Intron 3 | 48 | 229616 | 229635 | 1095 |
| 533914 | CAATGATGTTACTACTACTC | Intron 3 | 57 | 229617 | 229636 | 1096 |
| 533915 | TCCAATGATGTTACTACTAC | Intron 3 | 69 | 229619 | 229638 | 1097 |
| 533916 | TTCCAATGATGTTACTACTA | Intron 3 | 74 | 229620 | 229639 | 1098 |
| 533917 | ATTCCAATGATGTTACTACT | Intron 3 | 74 | 229621 | 229640 | 1099 |
| 533918 | CCCCTAGAGCAATGGTCTAG | Intron 3 | 71 | 232823 | 232842 | 1100 |
| 533919 | CCCCCTAGAGCAATGGTCTA | Intron 3 | 44 | 232824 | 232843 | 1101 |
| 533920 | TCCCCCTAGAGCAATGGTCT | Intron 3 | 54 | 232825 | 232844 | 1102 |
| 533921 | TATCCCCCTAGAGCAATGGT | Intron 3 | 62 | 232827 | 232846 | 1103 |
| 533922 | ATATCCCCCTAGAGCAATGG | Intron 3 | 50 | 232828 | 232847 | 1104 |
| 533923 | AATATCCCCCTAGAGCAATG | Intron 3 | 61 | 232829 | 232848 | 1105 |
| 533924 | GCTCACATTTGGAAGACAGT | Intron 3 | 68 | 233623 | 233642 | 1106 |
| 533925 | GGCTCACATTTGGAAGACAG | Intron 3 | 74 | 233624 | 233643 | 1107 |
| 533926 | AGGCTCACATTTGGAAGACA | Intron 3 | 56 | 233625 | 233644 | 1108 |
| 533927 | AGAGGCTCACATTTGGAAGA | Intron 3 | 34 | 233627 | 233646 | 1109 |
| 533928 | TAGAGGCTCACATTTGGAAG | Intron 3 | 18 | 233628 | 233647 | 1110 |
| 533929 | TTAGAGGCTCACATTTGGAA | Intron 3 | 19 | 233629 | 233648 | 1111 |
| 533930 | CTCAATTGCAGATGCTCTGA | Intron 3 | 66 | 237673 | 237692 | 1112 |
| 533931 | GCTCAATTGCAGATGCTCTG | Intron 3 | 72 | 237674 | 237693 | 1113 |
| 533932 | AGCTCAATTGCAGATGCTCT | Intron 3 | 74 | 237675 | 237694 | 1114 |
| 533933 | AAAGCTCAATTGCAGATGCT | Intron 3 | 66 | 237677 | 237696 | 1115 |
| 533934 | TAAAGCTCAATTGCAGATGC | Intron 3 | 59 | 237678 | 237697 | 1116 |
| 533935 | ATAAAGCTCAATTGCAGATG | Intron 3 | 23 | 237679 | 237698 | 1117 |
| 533936 | GTGAGTCCATTAAACCTCTT | Intron 3 | 73 | 244873 | 244892 | 1118 |
| 533937 | TGTGAGTCCATTAAACCTCT | Intron 3 | 73 | 244874 | 244893 | 1119 |
| 533938 | ACTGTGAGTCCATTAAACCT | Intron 3 | 17 | 244876 | 244895 | 1120 |
| 533939 | AACTGTGAGTCCATTAAACC | Intron 3 | 19 | 244877 | 244896 | 1121 |
| 533940 | GAACTGTGAGTCCATTAAAC | Intron 3 | 28 | 244878 | 244897 | 1122 |
| 533941 | ATATTGAAAGGCCCATCAAA | Intron 3 | 13 | 246498 | 246517 | 1123 |
| 533942 | AATATTGAAAGGCCCATCAA | Intron 3 | 31 | 246499 | 246518 | 1124 |
| 533943 | AAATATTGAAAGGCCCATCA | Intron 3 | 51 | 246500 | 246519 | 1125 |
| 533944 | GAAAATATTGAAAGGCCCAT | Intron 3 | 22 | 246502 | 246521 | 1126 |
| 533945 | GGAAAATATTGAAAGGCCCA | Intron 3 | 42 | 246503 | 246522 | 1127 |
| 533946 | AGGAAAATATTGAAAGGCCC | Intron 3 | 28 | 246504 | 246523 | 1128 |
| 533947 | GTATATTCAGTCCAAGGATC | Intron 3 | 65 | 248228 | 248247 | 1129 |
| 533948 | AGTATATTCAGTCCAAGGAT | Intron 3 | 63 | 248229 | 248248 | 1130 |
| 533949 | CAGTATATTCAGTCCAAGGA | Intron 3 | 67 | 248230 | 248249 | 1131 |
| 533950 | AACAGTATATTCAGTCCAAG | Intron 3 | 56 | 248232 | 248251 | 1132 |
| 533951 | AAACAGTATATTCAGTCCAA | Intron 3 | 60 | 248233 | 248252 | 1133 |
| 533952 | AAAACAGTATATTCAGTCCA | Intron 3 | 59 | 248234 | 248253 | 1134 |
| 533953 | TCTATTGTTGCCACCTTTAT | Intron 3 | 45 | 252838 | 252857 | 1135 |
| 533954 | TTCTATTGTTGCCACCTTTA | Intron 3 | 52 | 252839 | 252858 | 1136 |
| 533955 | TTTCTATTGTTGCCACCTTT | Intron 3 | 46 | 252840 | 252859 | 1137 |
| 533956 | AGTTTCTATTGTTGCCACCT | Intron 3 | 59 | 252842 | 252861 | 1138 |
| 533957 | CAGTTTCTATTGTTGCCACC | Intron 3 | 41 | 252843 | 252862 | 1139 |
| 533958 | CCAGTTTCTATTGTTGCCAC | Intron 3 | 48 | 252844 | 252863 | 1140 |

TABLE 17
Inhibition of GHR mRNA by 5-10-5 MOE gapmers targeting
intron 3 of SEQ ID NO: 2

| | | | SEQ | SEQ | |
|---|---|---|---|---|---|
| | | | ID | ID | |
| | | | NO: 2 | NO: 2 | SEQ |
| ISIS | | % | Start | Stop | ID |
| NO | Sequence | inhibition | Site | Site | NO |
| 532454 | GCAGAACTGATTGCTTACTT | 78 | 182862 | 182881 | 1141 |
| 532455 | AGGTCATAAGATTTTCATTT | 48 | 183533 | 183552 | 1142 |
| 532456 | GCCTCTGGCCATAAAGAAAT | 54 | 183578 | 183597 | 1143 |
| 532457 | AAAGTTTAAGAGGCACCCCA | 31 | 184508 | 184527 | 1144 |
| 532458 | GAATAAGCACAAAAGTTTAA | 28 | 184519 | 184538 | 1145 |
| 532459 | GAACCAAATAAACCTCTCTT | 52 | 185452 | 185471 | 1146 |
| 532460 | ATGTTGAAATTTGATCCCCA | 79 | 185763 | 185782 | 1147 |
| 532461 | TGTGAGAGCTCACTCACTAT | 42 | 186134 | 186153 | 1148 |
| 532462 | CTTGTGAGAGCTCACTCACT | 72 | 186136 | 186155 | 1149 |
| 532463 | ACATGGTGGCAGGAGAGAGG | 42 | 186206 | 186225 | 1150 |
| 532464 | CTAGAAAGAAACTACCTGAG | 12 | 186341 | 186360 | 1151 |
| 532465 | AACTTCAGTTGTAAAATAAT | 27 | 187044 | 187063 | 1152 |
| 532466 | GAAAAGGATTTTGAGATTTC | 43 | 188897 | 188916 | 1153 |
| 532467 | CTTAGCTGTCAAGGCCCTTT | 80 | 189084 | 189103 | 1154 |
| 532468 | TGTGCTTCATGTCTTTCTAG | 88 | 189119 | 189138 | 1155 |
| 532469 | CCCTTGAACATGCTATCCTT | 85 | 189256 | 189275 | 1156 |
| 532470 | CTTGCAGGGATGCATCTCAG | 87 | 189625 | 189644 | 1157 |
| 532471 | TCTCTTGCACATCTAATTTC | 82 | 189656 | 189675 | 1158 |
| 532472 | CTTCCAGCACAACCCATCAC | 77 | 190109 | 190128 | 1159 |
| 532473 | GTAACTACATTCCCTTTATC | 52 | 190860 | 190879 | 1160 |
| 532474 | AGTAACTACATTCCCTTTAT | 58 | 190861 | 190880 | 1161 |
| 532475 | CAGATAGCACAGGGCTAAAA | 84 | 190979 | 190998 | 1162 |
| 532476 | AGAATCAGGAATGTTTGCCT | 86 | 192904 | 192923 | 1163 |
| 532477 | TGACTCAATCATTTAGACTT | 45 | 192990 | 193009 | 1164 |
| 532478 | TCAACAGTCAATGGACTTGT | 71 | 193042 | 193061 | 1165 |
| 532479 | AATTTCTACTGCTATGATGC | 75 | 194806 | 194825 | 1166 |
| 532480 | ATGGTTCCAAATTTCTATCT | 86 | 195704 | 195723 | 1167 |
| 532481 | CTGTATGGCTTTAAGTATTC | 63 | 196756 | 196775 | 1168 |
| 532482 | AACTTATGAACTGTTCACCA | 86 | 198307 | 198326 | 1169 |
| 532483 | AATAAGCTTGAAGTCTGAAG | 63 | 199520 | 199539 | 1170 |
| 532484 | TAGTTATCTAACTGCCCAAT | 77 | 199544 | 199563 | 1171 |
| 532485 | TTCTGCAAAGCTTCCCAGTA | 72 | 200314 | 200333 | 1172 |
| 532486 | ACAACTTCAAGCTTCACATA | 65 | 200599 | 200618 | 1173 |
| 532487 | GAATCAATGTTCTGGCAAGA | 52 | 201842 | 201861 | 1174 |
| 532488 | CAGCCTTTCAGCTGTGAAAG | 52 | 204181 | 204200 | 1175 |
| 532489 | AACAATGCCAAGAAATCTAT | 74 | 204369 | 204388 | 1176 |
| 532490 | CCCACAGTAACAATGCCAAG | 90 | 204377 | 204396 | 1177 |
| 532491 | TTTTACCTCCCAGTGAAACT | 34 | 205896 | 205915 | 1178 |
| 532492 | TAATTGTTGATCCATGATGT | 5 | 208856 | 208875 | 1179 |
| 532493 | GTTGGAGAGACAAGTTTAAC | 29 | 208975 | 208994 | 1180 |
| 532494 | AGTCATAAAATTCAAATTAT | 39 | 209537 | 209556 | 1181 |
| 532495 | GGCCTTGGGCACACTTTCTC | 82 | 207510 | 207529 | 1182 |
| | | | 210189 | 210208 | |
| 532496 | AAGTTTTTATTGAAGTTAAT | 0 | 212551 | 212570 | 1183 |
| 532497 | AAGAAAAATTAGGAAGCTAG | 31 | 212649 | 212668 | 1184 |
| 532498 | CAGGGAGATAAGTTTATTCA | 61 | 212797 | 212816 | 1185 |
| 532499 | ATTTAATACACATTGGAATA | 15 | 213390 | 213409 | 1186 |
| 532500 | GTAGGACTATTTATGATTCC | 86 | 213914 | 213933 | 1187 |
| 532501 | CACTCTCTTGGGCTGTTAAG | 82 | 214479 | 214498 | 1188 |
| 532502 | GAGTATTTCAGGCTGGAAAA | 66 | 214623 | 214642 | 1064 |
| 532503 | TTGTTTGAGTTCCAAAAGAA | 39 | 214932 | 214951 | 1189 |
| 532504 | TTTGCCATGAGACACACAAT | 77 | 215932 | 215951 | 1190 |
| 532505 | CACCAAACCTCAGAGACATG | 80 | 216468 | 216487 | 1191 |
| 532506 | CCACTGTTAAGTGATGCATG | 83 | 217480 | 217499 | 1192 |
| 532507 | CTCTCAGGTAATTTCTGGAA | 86 | 219019 | 219038 | 1193 |
| 532508 | GCTCCTCACAATGACCCTTT | 84 | 219452 | 219471 | 1194 |
| 532509 | GGGACTGGCACTGGTAATTT | 56 | 220062 | 220081 | 1195 |
| 532510 | CTAACCATTAGTTACTGTAT | 69 | 220558 | 220577 | 1196 |
| 532511 | GGATTTTAGGTTCTTGCTGT | 51 | 221588 | 221607 | 1197 |
| 532512 | TGAATCATATACTGATATCA | 63 | 222914 | 222933 | 1198 |
| 532513 | TTGAGGTATTAAATTTTAAA | 0 | 223001 | 223020 | 1199 |
| 532514 | AGTTTGTAATGTAGTGATTT | 19 | 223156 | 223175 | 1200 |
| 532515 | AAATATTTGATAGCTCACAT | 18 | 224409 | 224428 | 1201 |
| 532516 | AGAAATATTTGATAGCTCAC | 57 | 224411 | 224430 | 1202 |
| 532517 | CCACATTTCAAATGTTCTCT | 80 | 224717 | 224736 | 1203 |
| 532518 | GCAGGAAGAGTGGCATGGAC | 59 | 224750 | 224769 | 1204 |
| 532519 | CACTTATCCAAATGCAGAGA | 82 | 225742 | 225761 | 1205 |
| 532520 | CAAGGTAATGGGAGGCTAGC | 47 | 225903 | 225922 | 1206 |
| 532521 | ATAGTCAAAGCTAAGGATAT | 4 | 226177 | 226196 | 1207 |
| 532522 | GTAATTTCATTCATGCTTCC | 67 | 226804 | 226823 | 1208 |
| 532523 | GTCCACATTCAGCTGTGTGT | 72 | 231912 | 231931 | 1209 |
| 532524 | TCATTCAGGAAATTCTGCTA | 62 | 232286 | 232305 | 1210 |
| 532525 | AACATGTCTCATTCAGGAAA | 71 | 232294 | 232313 | 1211 |
| 532526 | TAACATGTCTCATTCAGGAA | 85 | 232295 | 232314 | 1212 |
| 532527 | AGATTCCTCAAATTCAGTGA | 66 | 232389 | 232408 | 1213 |
| 532528 | TAAGCGGAAAAGGAGAAAAG | 0 | 233684 | 233703 | 1214 |
| 532529 | AAAGCAAGAGAATTCCTAAA | 32 | 234203 | 234222 | 1215 |
| 532530 | AATGAACCTTTAACTTAGTA | 40 | 234876 | 234895 | 1216 |

TABLE 18
Inhibition of GHR mRNA by 5-10-5 MOE gapmers targeting
introns 3-8 and intron-exonie regions of SEQ ID NO: 2

| | | | | SEQ | SEQ | |
|---|---|---|---|---|---|---|
| | | | | ID NO: | ID NO: | SEQ |
| ISIS | | Target | % | 2 Start | 2 Stop | ID |
| NO | Sequence | region | inhibition | Site | Site | NO |
| 523792 | AAAGCTTTGTGGATAAAGTT | Intron 3 | 44 | 213025 | 213044 | 1217 |
| 523793 | GAAGGAAAGGTTCTGTGGAA | Intron 3 | 38 | 213825 | 213844 | 1218 |
| 523794 | CTGAGTATTTCAGGCTGGAA | Intron 3 | 84 | 214625 | 214644 | 1219 |
| 523795 | TTGAATTATCCCTTTAAAAA | Intron 3 | 38 | 215446 | 215465 | 1220 |
| 523796 | TTTAGAATGGTTTGGCATAC | Intron 3 | 66 | 216365 | 216384 | 1221 |
| 523797 | GATATGTCCACATTGATTAG | Intron 3 | 65 | 218132 | 218151 | 1222 |
| 523798 | ATTATTTAAGCTTCTACTTT | Intron 3 | 44 | 218973 | 218992 | 1223 |
| 523799 | ATACATGGCAATTAAAAGAT | Intron 3 | 26 | 219886 | 219905 | 1224 |
| 523800 | TGAGATAGTGTGGGAAATAT | Intron 3 | 18 | 220686 | 220705 | 1225 |
| 523801 | TATTTTTGTGTTATGCCTTG | Intron 3 | 73 | 221486 | 221505 | 1226 |
| 523802 | TTATTAACTAGAATATGCCT | Intron 3 | 16 | 223110 | 223129 | 1227 |
| 523803 | GATTATTCTATTTTTATTTT | Intron 3 | 33 | 223948 | 223967 | 1228 |
| 523804 | AGGAAGAGTGGCATGGACAT | Intron 3 | 43 | 224748 | 224767 | 1229 |
| 523805 | CTTTTGCTTATTTACCTGGG | Intron 3 | 84 | 225568 | 225587 | 1230 |
| 523806 | TTTATATTATTAATATCATT | Intron 3 | 31 | 226371 | 226390 | 1231 |
| 523807 | GGTACATGGCTTTTAAGTGG | Intron 3 | 53 | 227218 | 227237 | 1232 |
| 523808 | AATATTGGTCAGGTTTAAGA | Intron 3 | 28 | 228018 | 228037 | 1233 |
| 523809 | ATTTCATCTCTTTCTTAGTT | Intron 3 | 45 | 228818 | 228837 | 1234 |
| 523810 | CCAATGATGTTACTACTACT | Intron 3 | 89 | 229618 | 229637 | 1235 |
| 523811 | GTTCCCCCAACCCCTTGGAA | Intron 3 | 28 | 230418 | 230437 | 1236 |
| 523812 | TATAGGAAGTGAGATGTATG | Intron 3 | 46 | 231218 | 231237 | 1237 |
| 523813 | ATTATTCTAGAAGAAGATTT | Intron 3 | 12 | 232018 | 232037 | 1238 |
| 523814 | ATCCCCCTAGAGCAATGGTC | Intron 3 | 79 | 232826 | 232845 | 1239 |
| 523815 | GAGGCTCACATTTGGAAGAC | Intron 3 | 69 | 233626 | 233645 | 1240 |
| 523816 | TACACAAATCCAAGGCAGAG | Intron 3 | 57 | 234447 | 234466 | 1241 |
| 523817 | AGGAAGAGTGGGAGTGTTAC | Intron 3 | 35 | 235258 | 235277 | 1242 |
| 523818 | GTCCCTGACTAGGCATTTTG | Intron 3 | 43 | 236071 | 236090 | 1243 |
| 523819 | AAGCTCAATTGCAGATGCTC | Intron 3 | 80 | 237676 | 237695 | 1244 |
| 523820 | CTGTGAGTCCATTAAACCTC | Intron 3 | 81 | 244875 | 244894 | 1245 |
| 523821 | TGAAATGTGGCTAGTGTGAC | Intron 3 | 51 | 245701 | 245720 | 1246 |
| 523822 | AAAATATTGAAAGGCCCATC | Intron 3 | 68 | 246501 | 246520 | 1247 |
| 523823 | AATGTCAATAGTGCCCTATT | Intron 3 | 48 | 247431 | 247450 | 1248 |
| 523824 | ACAGTATATTCAGTCCAAGG | Intron 3 | 82 | 248231 | 248250 | 1249 |
| 523825 | TGTCTATTTAAGTTTGTTGC | Intron 3 | 45 | 250001 | 250020 | 1250 |
| 523826 | TTCAAGTACTGTCATGAATA | Intron 3 | 47 | 251214 | 251233 | 1251 |
| 523827 | TTTCTTTTTCTTAAACTAAG | Intron 3 | 11 | 252041 | 252060 | 1252 |
| 523828 | GTTTCTATTGTTGCCACCTT | Intron 3 | 70 | 252841 | 252860 | 1253 |
| 523829 | AAGGCCACATATTATAGTAT | Intron 3 | 29 | 253698 | 253717 | 1254 |
| 523830 | ACCTGAACTATTAATTTCTT | Intron 3 | 19 | 255397 | 255416 | 1255 |
| 523831 | GAATGGGCTGAGTAGTTGAA | Intron 3 | 47 | 256197 | 256216 | 1256 |
| 523832 | TGATGAACATTGCTAATTTG | Intron 3 | 26 | 257018 | 257037 | 1257 |
| 523833 | ATCTTGCCTC GATGAAAGTT | Intron 3 | 17 | 257818 | 257837 | 1258 |
| 523834 | TTAAGTGGCACAGCCATGAT | Intron 3 | 9 | 258774 | 258793 | 1259 |
| 523835 | AATGAGTTAAGTTGGAACAC | Intron 3 | 25 | 261294 | 261313 | 1260 |
| 523836 | TCCTTAGTAGAATGCCTGGA | Intron 3 | 57 | 263338 | 263357 | 1261 |
| 523837 | TATGTAGAAAAATAAGCTGG | Intron 3 | 0 | 266514 | 266533 | 1262 |
| 523838 | GCCGAGGCAGGCACCTGAGT | Intron 3 | 43 | 267375 | 267394 | 1263 |
| 523839 | TGGTACCTATATTGAGAGGT | Intron 4 | 46 | 269052 | 269071 | 1264 |
| 523840 | TTAAGGAAAAATATAGTATA | Intron 4 | 7 | 269854 | 269873 | 1265 |
| 523841 | TTATTTATGTGTCAGGGATG | Intron 4 | 28 | 270668 | 270687 | 1266 |
| 523842 | CAAAAGTTAAGTGCTTTAGG | Intron 4 | 10 | 271468 | 271487 | 1267 |
| 523843 | TTCATAGATGTCTAAGGAAT | Intron 4 | 32 | 273341 | 273360 | 1268 |
| 523844 | ACCTGTGATTTACCTATTTC | Exon 5- | 18 | 274185 | 274204 | 1269 |
| | | intron 5 | | | | |
| | | junction | | | | |
| 523845 | TGCCTAGAAAACCACATAAA | Intron 5 | 38 | 274985 | 275004 | 1270 |
| 523846 | AAACATCCTCAAAGGTACCT | Intron 5 | 64 | 275808 | 275827 | 1271 |
| 523847 | CTTCCCTGAGACACACACAT | Intron 5 | 35 | 276617 | 276636 | 1272 |
| 523848 | CTTCTTCAATCTTCTCATAC | Intron 5 | 33 | 278288 | 278307 | 1273 |
| 523849 | TACCATTTTCCATTTAGTTT | Exon 6- | 7 | 279088 | 279107 | 1274 |
| | | intron 6 | | | | |
| | | junction | | | | |
| 523850 | ATTGGCATCTTTTTCAGTGG | Intron 6 | 34 | 279902 | 279921 | 1275 |
| 523851 | TCAAGCTCACGGTTGGAGAC | Intron 6 | 36 | 280799 | 280818 | 1276 |
| 523852 | AAATGAAATCAGTATGTTGA | Intron 6 | 0 | 281622 | 281641 | 1277 |
| 523853 | TGATTTATCACAAAGGTGCT | Intron 6 | 29 | 282437 | 282456 | 1278 |
| 523854 | AAAACAGTAGAAAAGATTAA | Intron 6 | 14 | 284073 | 284092 | 1279 |
| 523855 | CTACATCACAGCAGTCAGAA | Intron 6 | 23 | 285187 | 285206 | 1280 |
| 523856 | AAAAGATGTAAGTGTGACAT | Intron 6 | 28 | 286349 | 286368 | 1281 |
| | | | | 286919 | 286938 | |
| 523857 | TTACAAGAACTGCTAAAGGG | Intron 6 | 15 | 287151 | 287170 | 1282 |
| 523858 | ATAAAGAAAAAGTTAACTGA | Intron 6 | 9 | 287982 | 288001 | 1283 |
| 523859 | AGATAATATACTTCTTCTAT | Intron 6 | 4 | 288809 | 288828 | 1284 |
| 523860 | CCTTCTTCACATGTAAATTG | Exon 7- | 19 | 290456 | 290475 | 1285 |
| | | intron 7 | | | | |
| | | junction | | | | |
| 523861 | TTTCTATGTAGCTTGTGGTT | Intron 7 | 30 | 291258 | 291277 | 1286 |
| 523862 | AGGCAGAGTTTTTATTGATA | Intron 7 | 19 | 292058 | 292077 | 1287 |
| 523863 | ATAGTCACCAGCCTAAGCCT | Intron 8 | 28 | 292858 | 292877 | 1288 |
| 523864 | AGACTTTTAGCATGCTTGAC | Intron 8 | 56 | 293658 | 293677 | 1289 |
| 523865 | TTTACAGCCCTACAGTTCTA | Intron 8 | 7 | 294464 | 294483 | 1290 |
| 523866 | CCAGAGAACCTGACTCCAAA | Intron 8 | 6 | 295330 | 295349 | 1291 |
| 523867 | CAGAAGAAAATATTAGACAG | Intron 8 | 10 | 296993 | 297012 | 1292 |

TABLE 19
Inhibition of GHR mRNA by 5-10-5 MOE gapmers targeting
introns 3-8 of SEQ ID NO: 2

| | | | | SEQ | SEQ | |
|---|---|---|---|---|---|---|
| | | | | ID | ID | |
| | | | | NO: 2 | NO: 2 | SEQ |
| ISIS | | Target | % | Start | Stop | ID |
| NO | Sequence | Region | inhibition | Site | Site | NO |
| 532531 | TATTATACTTCTAAATTCCC | Intron 3 | 70 | 236716 | 236735 | 1293 |
| 532532 | TAAAAGCAAGAAAAAGGAAC | Intron 3 | 52 | 236889 | 236908 | 1294 |
| 532533 | CCTAATTTATATGAACAAAC | Intron 3 | 56 | 237177 | 237196 | 1295 |
| 532534 | TGCAATGCCTTAGCCTAAAA | Intron 3 | 86 | 238087 | 238106 | 1296 |
| 532535 | CACCACCATTATTACACTAC | Intron 3 | 75 | 238186 | 238205 | 1297 |
| 532536 | AAATAAATCAGATTATTATA | Intron 3 | 52 | 238242 | 238261 | 1298 |
| 532537 | CTTAGATCTGTGCTGTCCAA | Intron 3 | 81 | 245758 | 245777 | 1299 |
| 532538 | GTTAGTGTTAGATTCTTTGA | Intron 3 | 67 | 246152 | 246171 | 1300 |
| 532539 | CATGCTCACGGCTGTGTTAC | Intron 3 | 66 | 246248 | 246267 | 1301 |
| 532540 | CCCATCAAATACTGAGTTCT | Intron 3 | 86 | 246487 | 246506 | 1302 |
| 532541 | GAAAGTAGTGATTAATGAGA | Intron 3 | 38 | 247012 | 247031 | 1303 |
| 532542 | ATTAATCAACAAGTGGCATT | Intron 3 | 72 | 247203 | 247222 | 1304 |
| 532543 | TTTAATTTTAGGGTTTAGAG | Intron 3 | 48 | 248344 | 248363 | 1305 |
| 532544 | CTTGCTACCACTAGAGCCTT | Intron 3 | 69 | 248694 | 248713 | 1306 |
| 532545 | ACCACTGACTTATATCATTT | Intron 3 | 58 | 248743 | 248762 | 1307 |
| 532546 | TTCCCCATTGCTAATTTTGT | Intron 3 | 48 | 251601 | 251620 | 1308 |
| 532547 | TCCTGAAACTTAGTAGCTGG | Intron 3 | 83 | 253147 | 253166 | 1309 |
| 532548 | TGTCTTAAAAAGGAATAAAA | Intron 3 | 52 | 253785 | 253804 | 1310 |
| 532549 | CCTATAATAAAGTATTGTCT | Intron 3 | 70 | 253800 | 253819 | 1311 |
| 532550 | ATGTAAAATGGTATAGCTAC | Intron 3 | 50 | 254040 | 254059 | 1312 |
| 532551 | AACCCTCACACACTTCTGTT | Intron 3 | 71 | 254064 | 254083 | 1313 |
| 532552 | ATTCTGCATAAGCAGTGTTT | Intron 3 | 53 | 254246 | 254265 | 1314 |
| 532553 | TTACTACCCTGAAGAAGAAC | Intron 3 | 35 | 254314 | 254333 | 1315 |
| 532554 | AAGACCTATAACTTACTACC | Intron 3 | 49 | 254326 | 254345 | 1316 |
| 532555 | TTTCACAAGATTTACTTGGT | Intron 3 | 77 | 254641 | 254660 | 1317 |
| 532556 | CAGTTGTGATTGTCAACCTA | Intron 3 | 77 | 257073 | 257092 | 1318 |
| 532557 | AATCTTGCCTCGATGAAAGT | Intron 3 | 57 | 257819 | 257838 | 1319 |
| 532558 | TGGCCTAAATGTATCAGTTA | Intron 3 | 66 | 259157 | 259176 | 1320 |
| 532559 | AGGCTTTGGGTAAAATCTTT | Intron 3 | 67 | 259184 | 259203 | 1321 |
| 532560 | TATGATTTTTAAAGATTAAA | Intron 3 | 20 | 261419 | 261438 | 1322 |
| 532561 | GTACAGTGAAAAAGATGTGT | Intron 3 | 56 | 263666 | 263685 | 1323 |
| 532562 | GACAGGTATGAAGCAAAACA | Intron 3 | 64 | 267033 | 267052 | 1324 |
| 532563 | TGAGCTGAGGGTCTTTGCCG | Intron 3 | 61 | 267391 | 267410 | 1325 |
| 532564 | AGGCTGAGTTGTACACAAAC | Intron 4 | 52 | 269422 | 269441 | 1326 |
| 532565 | ATGAGGAGGCTGAGTTGTAC | Intron 4 | 43 | 269428 | 269447 | 1327 |
| 532566 | TCATAAAGTGGGCCCAGCTT | Intron 4 | 70 | 270044 | 270063 | 1328 |
| 532567 | ACTCCTAATCCCTCAGTTTT | Intron 4 | 62 | 270492 | 270511 | 1329 |
| 532568 | TTTACATGCAAGGAGCTGAG | Intron 4 | 61 | 271047 | 271066 | 1330 |
| 532569 | TAATGCCCTTTCTCCCTACT | Intron 4 | 60 | 271215 | 271234 | 1331 |
| 532570 | CCTGTTTAGATTATCCCAAA | Intron 4 | 62 | 271763 | 271782 | 1332 |
| 532571 | CATGATTCACAGAATTTCTC | Intron 4 | 56 | 271831 | 271850 | 1333 |
| 532572 | AGTTAGAAAACTCAAAGTAT | Intron 4 | 2 | 271915 | 271934 | 1334 |
| 532573 | TCAAATGTACTTAGCATAAG | Intron 4 | 9 | 271947 | 271966 | 1335 |
| 532574 | ATATCAAATGTACTTAGCAT | Intron 4 | 59 | 271950 | 271969 | 1336 |
| 532575 | AAAGTTCAGAAGAGGGAATG | Intron 4 | 51 | 273233 | 273252 | 1337 |
| 532576 | AATTCCCATCTGAGTAGTTT | Intron 4 | 56 | 273440 | 273459 | 1338 |
| 532577 | GTCCCCTAATTTCAGGCTAA | Intron 4 | 31 | 273471 | 273490 | 1339 |
| 532578 | CTATGTCAAATGAAACAAAA | Intron 5 | 38 | 274205 | 274224 | 1340 |
| 532579 | TGATTATGCTTTGTGATAAA | Intron 5 | 42 | 274624 | 274643 | 1341 |
| 532580 | TCCAGCTGACTAGGAGGGCT | Intron 5 | 7 | 275732 | 275751 | 1342 |
| 532581 | CATACCAGTCTCCTCGCTCA | Intron 5 | 0 | 276738 | 276757 | 1343 |
| 532582 | ATATAACAGAATCCAACCAT | Intron 5 | 47 | 277045 | 277064 | 1344 |
| | | | | 278361 | 278380 | |
| 532583 | TGCAAAATGGCCAAACTACA | Intron 5 | 56 | 277577 | 277596 | 1345 |
| 532584 | TCTTCCTAGCCACATGTGAT | Intron 5 | 32 | 278227 | 278246 | 1346 |
| 532585 | TACCATGCTCTCTAATTGCC | Intron 6 | 47 | 279624 | 279643 | 1347 |
| 532586 | AGTGATCTGTGCCAGGCTGC | Intron 6 | 65 | 279848 | 279867 | 1348 |
| 532587 | AAGTTACAGAACAGATATCT | Intron 6 | 61 | 280012 | 280031 | 1349 |
| 532588 | GTATTGTGAAAATAGTACTG | Intron 6 | 45 | 280226 | 280245 | 1350 |
| 532589 | AAACACTATCAAGCTCACGG | Intron 6 | 54 | 280807 | 280826 | 1351 |
| 532590 | TTCAAGAAAAGTCTTCAAAT | Intron 6 | 24 | 280831 | 280850 | 1352 |
| 532591 | GGATCATTTCCCCATGCATG | Intron 6 | 52 | 280982 | 281001 | 1353 |
| 532592 | ATATTATATTAAGAAAAATG | Intron 6 | 4 | 281422 | 281441 | 1354 |
| 532593 | CTCCCATGTTCATTACTTAT | Intron 6 | 49 | 281587 | 281606 | 1355 |
| 532594 | CATGACATTGGTTTGGGCAA | Intron 6 | 43 | 282229 | 282248 | 1356 |
| 532595 | AATGTTGTTGGGAAAATTGG | Intron 6 | 42 | 282383 | 282402 | 1357 |
| 532596 | AGCTGCAGGATACAAAGTCA | Intron 6 | 49 | 282986 | 283005 | 1358 |
| 532597 | ATATCCTTTCATGATAAAAA | Intron 6 | 31 | 283354 | 283373 | 1359 |
| 532598 | ATGGGCTAATATCTCTGATA | Intron 6 | 50 | 283590 | 283609 | 1360 |
| 532599 | ACATTACTAATAATTAGAGA | Intron 6 | 0 | 285236 | 285255 | 1361 |
| 532600 | ATAAAAACATATGAAAGTAT | Intron 6 | 12 | 287093 | 287112 | 1362 |
| 532601 | TTCTGAATTAAATCTATTAG | Intron 6 | 16 | 287408 | 287427 | 1363 |
| 532602 | TTACATTTTTGCAAATTTAT | Intron 6 | 31 | 287472 | 287491 | 1364 |
| 532603 | TGAACAGTTGATTAACAAAG | Intron 6 | 15 | 287887 | 287906 | 1365 |
| 532604 | AAGTTATTGGTTTACTAGAT | Intron 6 | 0 | 288598 | 288617 | 1366 |
| 532605 | TTGGAAAAGGTCCTAGAAAA | Intron 6 | 24 | 289808 | 289827 | 1367 |
| 532606 | CATGACAGAAACTTCTTAGA | Intron 7 | 25 | 292035 | 292054 | 1368 |
| 532607 | CCATACTTGCTGACAAATAT | Intron 8 | 39 | 294389 | 294408 | 1369 |

### Example 2

### Dose-Dependent Antisense Inhibition of Human GHR in Hep3B Cells by MOE Gapmers

[0393] Gapmers from Example 1 exhibiting significant in vitro inhibition of GHR mRNA were selected and tested at various doses in Hep3B cells. The antisense oligonucleotides were tested in a series of experiments that had similar culture conditions. The results for each experiment are presented in separate tables shown below. Cells were plated at a density of 20,000 cells per well and transfected using electroporation with 0.625 μM, 1.25 μM, 2.50 μM, 5.00 μM and 10.00 μM concentrations of antisense oligonucleotide, as specified in the Tables below. After a treatment period of approximately 16 hours, RNA was isolated from the cells and GHR mRNA levels were measured by quantitative real-time PCR. Human primer probe set RTS3437 MGB was used to measure mRNA levels. GHR mRNA levels were adjusted according to total RNA content, as measured by RIBOGREEN®. Results are presented as percent inhibition of GHR, relative to untreated control cells.

[0394] The half maximal inhibitory concentration (IC₅₀) of each oligonucleotide is also presented. GHR mRNA levels were significantly reduced in a dose-dependent manner in antisense oligonucleotide treated cells.

TABLE 20

| | | | | | 10.00 | IC₅₀ |
|---|---|---|---|---|---|---|
| ISIS No | 0.625 μM | 1.250 μM | 2.50 μM | 5.00 μM | μM | (μM) |
| 523271 | 41 | 61 | 73 | 86 | 92 | 0.8 |
| 523274 | 20 | 36 | 64 | 80 | 92 | 1.8 |
| 523324 | 35 | 45 | 68 | 91 | 90 | 1.2 |

TABLE 21

| | | | | | 10.00 | IC₅₀ |
|---|---|---|---|---|---|---|
| ISIS No | 0.625 μM | 1.250 μM | 2.50 μM | 5.00 μM | μM | (μM) |
| 523604 | 21 | 42 | 68 | 58 | 86 | 2.0 |
| 523577 | 6 | 22 | 56 | 66 | 91 | 2.7 |
| 523614 | 14 | 44 | 61 | 84 | 87 | 1.9 |
| 523564 | 4 | 26 | 48 | 67 | 86 | 2.8 |
| 523633 | 30 | 43 | 71 | 82 | 84 | 1.4 |
| 523571 | 2 | 9 | 38 | 55 | 82 | 3.9 |

TABLE 22

| | | | | | 10.00 | IC₅₀ |
|---|---|---|---|---|---|---|
| ISIS No | 0.625 μM | 1.250 μM | 2.50 μM | 5.00 μM | μM | (μM) |
| 523570 | 25 | 50 | 64 | 77 | 88 | 1.5 |
| 523592 | 27 | 42 | 59 | 79 | 88 | 1.7 |
| 523595 | 21 | 50 | 62 | 76 | 90 | 1.6 |
| 523596 | 36 | 47 | 62 | 75 | 77 | 1.4 |
| 523607 | 49 | 62 | 71 | 82 | 84 | 0.5 |
| 523615 | 20 | 49 | 63 | 83 | 91 | 1.6 |
| 523630 | 4 | 28 | 54 | 79 | 78 | 2.6 |
| 523661 | 4 | 34 | 48 | 73 | 79 | 2.7 |
| 523665 | 4 | 28 | 54 | 73 | 79 | 2.7 |
| 523687 | 30 | 56 | 61 | 78 | 81 | 1.4 |
| 523711 | 42 | 66 | 78 | 94 | 95 | 0.7 |
| 523712 | 6 | 37 | 60 | 72 | 89 | 2.3 |
| 523713 | 4 | 32 | 55 | 72 | 85 | 2.5 |
| 523714 | 59 | 75 | 88 | 95 | 97 | 0.2 |

TABLE 23

| | | | | | 10.00 | IC₅₀ |
|---|---|---|---|---|---|---|
| ISIS No | 0.625 μM | 1.250 μM | 2.50 μM | 5.00 μM | μM | (μM) |
| 523655 | 26 | 33 | 60 | 67 | 78 | 2.1 |
| 523656 | 19 | 33 | 45 | 69 | 87 | 2.4 |
| 523658 | 0 | 42 | 62 | 67 | 79 | 3.1 |
| 523715 | 78 | 90 | 92 | 93 | 95 | <0.6 |
| 523718 | 30 | 46 | 67 | 84 | 92 | 1.4 |
| 523723 | 56 | 69 | 83 | 92 | 94 | 0.3 |
| 523725 | 45 | 64 | 79 | 89 | 95 | 0.6 |
| 523726 | 32 | 48 | 77 | 88 | 89 | 1.2 |
| 523736 | 0 | 64 | 75 | 90 | 96 | 1.5 |
| 523747 | 48 | 64 | 80 | 91 | 92 | 0.6 |
| 523758 | 25 | 39 | 61 | 74 | 84 | 1.9 |
| 523766 | 7 | 37 | 66 | 81 | 93 | 2.0 |
| 523776 | 26 | 54 | 72 | 78 | 83 | 1.3 |
| 523789 | 62 | 68 | 81 | 85 | 90 | 0.2 |

TABLE 24

| | | | | | 10.00 | IC₅₀ |
|---|---|---|---|---|---|---|
| ISIS No | 0.625 μM | 1.250 μM | 2.50 μM | 5.00 μM | μM | (μM) |
| 523719 | 24 | 46 | 65 | 84 | 93 | 1.5 |
| 523720 | 18 | 49 | 72 | 85 | 93 | 1.5 |
| 523724 | 43 | 61 | 77 | 91 | 91 | 0.7 |
| 523735 | 8 | 42 | 63 | 81 | 93 | 2.0 |
| 523740 | 37 | 58 | 72 | 83 | 88 | 1.0 |
| 523752 | 9 | 29 | 52 | 72 | 86 | 2.5 |
| 523763 | 8 | 32 | 57 | 70 | 80 | 2.6 |
| 523764 | 43 | 52 | 67 | 77 | 79 | 0.9 |
| 523765 | 24 | 48 | 62 | 88 | 4 | 1.5 |
| 523767 | 49 | 62 | 67 | 72 | 82 | 0.6 |
| 523772 | 29 | 39 | 54 | 62 | 61 | 2.7 |
| 523774 | 28 | 59 | 63 | 88 | 91 | 1.2 |
| 523778 | 25 | 32 | 63 | 78 | 84 | 1.9 |
| 523783 | 0 | 22 | 53 | 72 | 88 | 2.8 |

TABLE 25

| | | | | | 10.00 | IC₅₀ |
|---|---|---|---|---|---|---|
| ISIS No | 0.625 μM | 1.250 μM | 2.50 μM | 5.00 μM | μM | (μM) |
| 532151 | 57 | 69 | 76 | 85 | 88 | <0.6 |
| 532153 | 23 | 43 | 54 | 80 | 86 | 1.8 |
| 532158 | 46 | 58 | 81 | 87 | 87 | 0.6 |
| 532160 | 17 | 26 | 55 | 76 | 92 | 2.2 |
| 532162 | 14 | 46 | 71 | 83 | 93 | 1.7 |
| 532164 | 37 | 76 | 82 | 90 | 93 | 0.6 |
| 532171 | 41 | 81 | 67 | 81 | 83 | <0.6 |
| 532181 | 56 | 81 | 84 | 89 | 93 | 0.2 |
| 532186 | 26 | 65 | 75 | 83 | 91 | 1.1 |
| 532188 | 51 | 68 | 80 | 89 | 93 | <0.6 |
| 532189 | 24 | 31 | 52 | 75 | 86 | 2.1 |
| 532197 | 0 | 40 | 66 | 85 | 93 | 2.1 |
| 532199 | 24 | 37 | 50 | 73 | 87 | 2.1 |
| 532222 | 12 | 41 | 67 | 84 | 94 | 1.8 |

TABLE 26

| | | | | | 10.00 | IC₅₀ |
|---|---|---|---|---|---|---|
| ISIS No | 0.625 μM | 1.250 μM | 2.50 μM | 5.00 μM | μM | (μM) |
| 532175 | 41 | 54 | 76 | 84 | 89 | 0.9 |
| 532223 | 53 | 69 | 75 | 88 | 94 | <0.6 |
| 532235 | 43 | 58 | 67 | 77 | 82 | 0.8 |
| 532241 | 39 | 53 | 62 | 73 | 87 | 1.2 |
| 532248 | 49 | 65 | 72 | 85 | 93 | 0.6 |
| 532254 | 52 | 62 | 85 | 87 | 92 | <0.6 |
| 532300 | 20 | 29 | 49 | 66 | 78 | 2.7 |
| 532304 | 26 | 39 | 66 | 78 | 90 | 1.7 |
| 532316 | 41 | 66 | 76 | 86 | 94 | 0.7 |
| 532395 | 32 | 56 | 84 | 93 | 97 | 1.0 |
| 532401 | 47 | 80 | 92 | 96 | 98 | <0.6 |
| 532411 | 73 | 90 | 94 | 97 | 98 | <0.6 |
| 532420 | 38 | 49 | 82 | 85 | 97 | 1.0 |
| 532436 | 37 | 58 | 75 | 90 | 96 | 0.9 |

TABLE 27

| | | | | | 10.00 | IC₅₀ |
|---|---|---|---|---|---|---|
| ISIS No | 0.625 μM | 1.250 μM | 2.50 μM | 5.00 μM | μM | (μM) |
| 532410 | 66 | 83 | 92 | 94 | 97 | <0.6 |
| 532468 | 45 | 68 | 78 | 93 | 94 | 0.6 |
| 532469 | 0 | 17 | 56 | 76 | 92 | 2.8 |
| 532470 | 10 | 34 | 62 | 84 | 94 | 2.0 |
| 532475 | 13 | 36 | 52 | 64 | 87 | 2.5 |
| 532476 | 34 | 64 | 73 | 79 | 93 | 0.9 |
| 532480 | 28 | 54 | 67 | 78 | 87 | 1.4 |
| 532482 | 21 | 39 | 69 | 83 | 92 | 1.7 |
| 532490 | 42 | 60 | 68 | 84 | 93 | 0.9 |
| 532500 | 37 | 50 | 63 | 81 | 87 | 1.2 |
| 532506 | 13 | 41 | 66 | 75 | 89 | 1.9 |
| 532507 | 47 | 59 | 71 | 86 | 89 | 0.7 |
| 532508 | 0 | 31 | 73 | 83 | 89 | 2.2 |
| 532526 | 31 | 56 | 78 | 79 | 88 | 1.1 |

TABLE 28

| | | | | | 10.00 | IC₅₀ |
|---|---|---|---|---|---|---|
| ISIS No | 0.625 μM | 1.250 μM | 2.50 μM | 5.00 μM | μM | (μM) |
| 532495 | 59 | 74 | 81 | 87 | 95 | <0.6 |
| 532501 | 49 | 53 | 71 | 83 | 84 | 0.7 |
| 532534 | 53 | 75 | 85 | 91 | 97 | <0.6 |
| 532535 | 0 | 34 | 61 | 84 | 92 | 2.6 |
| 532537 | 49 | 67 | 80 | 90 | 94 | <0.6 |
| 532540 | 59 | 70 | 87 | 93 | 95 | <0.6 |
| 532547 | 57 | 71 | 81 | 91 | 92 | <0.6 |
| 532555 | 48 | 36 | 61 | 72 | 85 | 1.3 |
| 532556 | 33 | 57 | 67 | 86 | 90 | 1.1 |

TABLE 29

| | | | | | 10.00 | IC₅₀ |
|---|---|---|---|---|---|---|
| ISIS No | 0.625 μM | 1.250 μM | 2.50 μM | 5.00 μM | μM | (μM) |
| 523421 | 32 | 57 | 81 | 82 | 88 | 1.0 |
| 533006 | 46 | 43 | 69 | 83 | 91 | 1.0 |
| 533121 | 53 | 75 | 75 | 88 | 93 | <0.6 |
| 533122 | 65 | 77 | 82 | 90 | 93 | <0.6 |
| 533123 | 39 | 71 | 84 | 91 | 95 | 0.6 |
| 533125 | 49 | 61 | 81 | 85 | 91 | 0.6 |
| 533131 | 3 | 57 | 59 | 82 | 90 | 1.9 |
| 533136 | 32 | 65 | 62 | 81 | 88 | 1.1 |
| 533139 | 13 | 51 | 72 | 90 | 94 | 1.5 |
| 533140 | 36 | 66 | 39 | 87 | 92 | 1.2 |
| 533153 | 50 | 65 | 83 | 89 | 90 | <0.6 |
| 533156 | 43 | 64 | 74 | 85 | 90 | 0.7 |
| 533160 | 57 | 80 | 87 | 91 | 95 | <0.6 |
| 533161 | 54 | 62 | 81 | 89 | 92 | <0.6 |

TABLE 30

| | | | | | 10.00 | IC₅₀ |
|---|---|---|---|---|---|---|
| ISIS No | 0.625 μM | 1.250 μM | 2.50 μM | 5.00 μM | μM | (μM) |
| 533234 | 50 | 70 | 86 | 93 | 95 | <0.6 |
| 533237 | 5 | 45 | 63 | 84 | 93 | 1.9 |
| 533233 | 43 | 55 | 76 | 90 | 95 | 0.8 |
| 533179 | 31 | 63 | 75 | 87 | 87 | 1.0 |
| 533178 | 53 | 67 | 76 | 89 | 94 | <0.6 |
| 533187 | 5 | 15 | 53 | 79 | 86 | 2.7 |
| 533188 | 49 | 68 | 83 | 89 | 94 | <0.6 |
| 533271 | 45 | 66 | 85 | 92 | 94 | 0.6 |
| 533134 | 22 | 45 | 64 | 81 | 89 | 1.6 |
| 533258 | 52 | 72 | 88 | 93 | 95 | <0.6 |
| 533235 | 50 | 54 | 75 | 82 | 90 | 0.7 |
| 533262 | 23 | 54 | 78 | 91 | 96 | 1.2 |
| 533189 | 48 | 66 | 78 | 82 | 88 | <0.6 |
| 533193 | 38 | 53 | 72 | 77 | 91 | 1.0 |

TABLE 31

| | | | | | 10.00 | IC₅₀ |
|---|---|---|---|---|---|---|
| ISIS No | 0.625 μM | 1.250 μM | 2.50 μM | 5.00 μM | μM | (μM) |
| 533259 | 63 | 78 | 84 | 90 | 92 | <0.6 |
| 533291 | 25 | 57 | 75 | 86 | 96 | 1.2 |
| 533256 | 67 | 76 | 90 | 95 | 95 | <0.6 |
| 533269 | 42 | 75 | 82 | 94 | 97 | 0.6 |
| 533265 | 67 | 78 | 91 | 95 | 97 | <0.6 |
| 533318 | 16 | 45 | 77 | 87 | 95 | 1.5 |
| 533257 | 55 | 84 | 91 | 96 | 96 | <0.6 |
| 533280 | 34 | 62 | 80 | 91 | 91 | 0.9 |
| 533301 | 52 | 77 | 84 | 93 | 96 | <0.6 |
| 533316 | 41 | 50 | 79 | 93 | 94 | 0.9 |
| 533270 | 62 | 71 | 88 | 94 | 97 | <0.6 |
| 533330 | 46 | 76 | 93 | 97 | 98 | <0.6 |
| 533317 | 55 | 60 | 82 | 87 | 96 | <0.6 |
| 533315 | 39 | 56 | 82 | 87 | 93 | 0.9 |

TABLE 32

| | 0.625 | 1.250 | 2.50 | 5.00 | 10.00 | IC₅₀ |
|---|---|---|---|---|---|---|
| ISIS No | μM | μM | μM | μM | μM | (μM) |
| 533364 | 71 | 77 | 92 | 90 | 94 | <0.6 |
| 533925 | 26 | 55 | 61 | 85 | 91 | 1.4 |
| 533326 | 54 | 77 | 80 | 93 | 95 | <0.6 |
| 533916 | 18 | 62 | 69 | 83 | 93 | 1.4 |
| 533328 | 52 | 68 | 89 | 94 | 98 | <0.6 |
| 533932 | 42 | 49 | 80 | 86 | 92 | 0.9 |
| 533352 | 42 | 82 | 88 | 93 | 94 | <0.6 |
| 533917 | 20 | 37 | 57 | 78 | 84 | 2.0 |
| 533331 | 54 | 83 | 89 | 93 | 96 | <0.6 |
| 533936 | 21 | 46 | 73 | 84 | 88 | 1.5 |
| 533329 | 56 | 73 | 84 | 92 | 98 | <0.6 |
| 533937 | 26 | 32 | 79 | 86 | 94 | 1.5 |
| 533908 | 58 | 66 | 81 | 88 | 94 | <0.6 |
| 533898 | 61 | 64 | 84 | 90 | 92 | <0.6 |

TABLE 33

| | 0.625 | 1.250 | 2.50 | 5.00 | 10.00 | IC₅₀ |
|---|---|---|---|---|---|---|
| ISIS No | μM | μM | μM | μM | μM | (μM) |
| 539371 | 32 | 41 | 82 | 92 | 98 | 1.2 |
| 539382 | 18 | 58 | 74 | 91 | 97 | 1.3 |
| 539392 | 34 | 59 | 79 | 94 | 96 | 0.9 |
| 539398 | 31 | 53 | 89 | 94 | 98 | 1.0 |
| 539399 | 31 | 72 | 87 | 95 | 97 | 0.8 |
| 539400 | 36 | 60 | 79 | 93 | 97 | 0.9 |
| 539405 | 33 | 58 | 74 | 91 | 94 | 1.0 |
| 539412 | 23 | 61 | 80 | 93 | 95 | 1.1 |
| 539413 | 53 | 75 | 86 | 92 | 96 | <0.6 |
| 539415 | 47 | 62 | 84 | 91 | 96 | 0.6 |
| 539416 | 61 | 85 | 94 | 97 | 96 | <0.6 |
| 539430 | 24 | 48 | 68 | 80 | 93 | 1.5 |
| 539431 | 14 | 40 | 71 | 89 | 95 | 1.7 |
| 539433 | 46 | 67 | 74 | 92 | 95 | 0.6 |

### Example 3

### Dose-Dependent Antisense Inhibition of Human GHR in Hep3B Cells by MOE Gapmers

[0395] Gapmers from the studies described above exhibiting significant in vitro inhibition of GHR mRNA were selected and tested at various doses in Hep3B cells. The antisense oligonucleotides were tested in a series of experiments that had similar culture conditions. The results for each experiment are presented in separate tables shown below. Cells were plated at a density of 20,000 cells per well and transfected using electroporation with 0.3125 μM, 0.625 μM, 1.25 μM, 2.50 μM, 5.00 μM and 10.00 μM concentrations of antisense oligonucleotide, as specified in the Tables below. After a treatment period of approximately 16 hours, RNA was isolated from the cells and GHR mRNA levels were measured by quantitative real-time PCR. Human primer probe set RTS3437_MGB was used to measure mRNA levels. GHR mRNA levels were adjusted according to total RNA content, as measured by RIBOGREEN®. Results are presented as percent inhibition of GHR, relative to untreated control cells.

[0396] The half maximal inhibitory concentration (IC₅₀) of each oligonucleotide is also presented. GHR mRNA levels were significantly reduced in a dose-dependent manner in antisense oligonucleotide treated cells.

TABLE 34

| | 0.3125 | 0.625 | 1.250 | 2.50 | 5.00 | 10.00 | IC₅₀ |
|---|---|---|---|---|---|---|---|
| ISIS No | μM | μM | μM | μM | μM | μM | (μM) |
| 523814 | 0 | 24 | 48 | 52 | 68 | 82 | 2.2 |
| 523805 | 13 | 29 | 55 | 0 | 79 | 85 | 1.5 |
| 523822 | 0 | 19 | 26 | 41 | 65 | 85 | 2.8 |
| 523820 | 0 | 19 | 29 | 58 | 74 | 86 | 2.3 |
| 523815 | 3 | 6 | 19 | 37 | 45 | 71 | 4.8 |
| 523828 | 12 | 19 | 32 | 51 | 64 | 74 | 2.7 |
| 523801 | 3 | 9 | 31 | 43 | 59 | 76 | 3.3 |
| 523824 | 12 | 28 | 44 | 63 | 77 | 85 | 1.7 |
| 523794 | 13 | 21 | 30 | 51 | 66 | 78 | 2.5 |
| 523810 | 15 | 34 | 55 | 72 | 78 | 86 | 1.3 |
| 523819 | 0 | 24 | 40 | 60 | 66 | 75 | 2.4 |

TABLE 35

| | 0.3125 | 0.625 | 1.250 | 2.50 | 5.00 | 10.00 | IC₅₀ |
|---|---|---|---|---|---|---|---|
| ISIS No | μM | μM | μM | μM | μM | μM | (μM) |
| 539302 | 31 | 56 | 80 | 92 | 97 | 98 | 0.5 |
| 539314 | 16 | 28 | 49 | 69 | 85 | 95 | 1.3 |
| 539319 | 8 | 30 | 45 | 71 | 90 | 94 | 1.4 |
| 539320 | 11 | 42 | 64 | 83 | 92 | 95 | 1.0 |
| 539321 | 25 | 48 | 64 | 82 | 95 | 97 | 0.8 |
| 539322 | 19 | 34 | 58 | 72 | 90 | 96 | 1.1 |
| 539331 | 7 | 14 | 46 | 69 | 88 | 96 | 1.6 |
| 539355 | 28 | 35 | 67 | 89 | 96 | 98 | 0.8 |
| 539358 | 12 | 39 | 56 | 80 | 93 | 98 | 1.1 |
| 539359 | 15 | 23 | 58 | 77 | 93 | 98 | 1.2 |

TABLE 36

| | 0.3125 | 0.625 | 1.250 | 2.50 | 5.00 | 10.00 | IC₅₀ |
|---|---|---|---|---|---|---|---|
| ISIS No | μM | μM | μM | μM | μM | μM | (μM) |
| 539318 | 23 | 21 | 56 | 73 | 88 | 94 | 1.2 |
| 539325 | 14 | 26 | 38 | 74 | 92 | 98 | 1.4 |
| 539339 | 18 | 23 | 58 | 83 | 92 | 98 | 1.1 |
| 539341 | 17 | 29 | 62 | 84 | 94 | 95 | 1.0 |
| 539342 | 20 | 31 | 43 | 71 | 90 | 95 | 1.2 |
| 539352 | 15 | 23 | 41 | 61 | 89 | 95 | 1.5 |
| 539356 | 24 | 46 | 62 | 83 | 90 | 97 | 0.8 |
| 539361 | 37 | 42 | 73 | 88 | 96 | 98 | 0.6 |
| 539379 | 53 | 66 | 83 | 96 | 96 | 98 | 0.2 |
| 539380 | 52 | 77 | 91 | 97 | 97 | 99 | 0.1 |
| 539383 | 34 | 61 | 71 | 89 | 98 | 98 | 0.5 |

TABLE 37

| | 0.3125 | 0.625 | 1.250 | 2.50 | 5.00 | 10.00 | IC₅₀ |
|---|---|---|---|---|---|---|---|
| ISIS No | μM | μM | μM | μM | μM | μM | (μM) |
| 539360 | 45 | 60 | 81 | 94 | 97 | 98 | 0.3 |
| 539362 | 21 | 36 | 72 | 90 | 98 | 99 | 0.8 |
| 539375 | 23 | 36 | 66 | 85 | 95 | 99 | 0.9 |
| 539376 | 26 | 35 | 58 | 82 | 95 | 99 | 0.9 |
| 539377 | 29 | 31 | 43 | 64 | 85 | 89 | 1.3 |
| 539378 | 37 | 59 | 81 | 93 | 97 | 98 | 0.4 |
| 539389 | 34 | 61 | 61 | 87 | 95 | 97 | 0.5 |
| 539401 | 34 | 52 | 63 | 84 | 92 | 95 | 0.6 |
| 539403 | 52 | 73 | 83 | 94 | 97 | 98 | 0.1 |
| 539404 | 22 | 55 | 74 | 88 | 94 | 96 | 0.6 |
| 539432 | 32 | 50 | 75 | 86 | 94 | 96 | 0.6 |

### Example 4

### Dose-Dependent Antisense Inhibition of Human GHR in Hep3B Cells by MOE Gapmers

[0397] Gapmers from studies described above exhibiting significant in vitro inhibition of GHR mRNA were selected and tested at various doses in Hep3B cells. The antisense oligonucleotides were tested in a series of experiments that had similar culture conditions. The results for each experiment are presented in separate tables shown below. Cells were plated at a density of 20,000 cells per well and transfected using electroporation with 0.625 μM, 1.25 μM, 2.50 μM, 5.00 μM and 10.00 μM concentrations of antisense oligonucleotide, as specified in the Tables below. After a treatment period of approximately 16 hours, RNA was isolated from the cells and GHR mRNA levels were measured by quantitative real-time PCR. Human primer probe set RTS3437_MGB was used to measure mRNA levels. GHR mRNA levels were adjusted according to total RNA content, as measured by RIBOGREEN®. Results are presented as percent inhibition of GHR, relative to untreated control cells.

[0398] The half maximal inhibitory concentration (IC₅₀) of each oligonucleotide is also presented. GHR mRNA levels were significantly reduced in a dose-dependent manner in antisense oligonucleotide treated cells.

TABLE 38

| | 0.625 | 1.250 | 2.50 | 5.00 | 10.00 | IC₅₀ |
|---|---|---|---|---|---|---|
| ISIS No | μM | μM | μM | μM | μM | (μM) |
| 523271 | 26 | 41 | 80 | 89 | 94 | 1.4 |
| 523274 | 13 | 35 | 63 | 85 | 95 | 1.9 |
| 523324 | 26 | 40 | 64 | 88 | 95 | 1.6 |
| 523577 | 27 | 50 | 72 | 87 | 95 | 1.3 |
| 523604 | 49 | 66 | 74 | 81 | 87 | 0.5 |
| 523614 | 43 | 54 | 82 | 92 | 89 | 0.8 |

TABLE 39

| | 0.625 | 1.250 | 2.50 | 5.00 | 10.00 | IC₅₀ |
|---|---|---|---|---|---|---|
| ISIS No | μM | μM | μM | μM | μM | (μM) |
| 523564 | 16 | 48 | 69 | 75 | 91 | 1.7 |
| 523570 | 24 | 52 | 65 | 71 | 88 | 1.6 |
| 523592 | 6 | 31 | 52 | 65 | 81 | 2.8 |
| 523595 | 13 | 49 | 60 | 79 | 92 | 1.8 |
| 523596 | 20 | 49 | 62 | 71 | 75 | 1.9 |
| 523607 | 38 | 63 | 66 | 74 | 76 | 0.8 |
| 523615 | 17 | 48 | 60 | 80 | 92 | 1.8 |
| 523630 | 19 | 42 | 42 | 67 | 80 | 2.5 |
| 523633 | 41 | 69 | 78 | 79 | 80 | 0.6 |
| 523665 | 16 | 45 | 56 | 71 | 80 | 2.1 |
| 523687 | 37 | 59 | 73 | 75 | 78 | 0.9 |
| 523711 | 33 | 63 | 78 | 91 | 93 | 0.9 |
| 523712 | 13 | 36 | 61 | 78 | 87 | 2.1 |
| 523714 | 63 | 85 | 91 | 96 | 96 | <0.6 |

TABLE 40

| | 0.625 | 1.250 | 2.50 | 5.00 | 10.00 | IC₅₀ |
|---|---|---|---|---|---|---|
| ISIS No | μM | μM | μM | μM | μM | (μM) |
| 523655 | 28 | 42 | 57 | 74 | 76 | 1.9 |
| 523656 | 33 | 43 | 53 | 74 | 88 | 1.7 |
| 523661 | 29 | 29 | 66 | 79 | 82 | 1.9 |
| 523713 | 35 | 45 | 64 | 83 | 87 | 1.3 |
| 523715 | 83 | 86 | 92 | 93 | 94 | <0.6 |
| 523718 | 27 | 52 | 69 | 84 | 95 | 1.3 |
| 523723 | 65 | 74 | 86 | 85 | 94 | <0.6 |
| 523725 | 37 | 63 | 78 | 78 | 92 | 0.8 |
| 523726 | 43 | 57 | 72 | 86 | 89 | 0.8 |
| 523736 | 39 | 65 | 80 | 88 | 95 | 0.8 |
| 523747 | 51 | 71 | 83 | 86 | 93 | <0.6 |
| 523766 | 30 | 50 | 70 | 82 | 89 | 1.3 |
| 523776 | 45 | 59 | 67 | 79 | 84 | 0.7 |
| 523789 | 63 | 75 | 76 | 83 | 83 | <0.6 |

TABLE 41

| | 0.625 | 1.250 | 2.50 | 5.00 | 10.00 | IC₅₀ |
|---|---|---|---|---|---|---|
| ISIS No | μM | μM | μM | μM | μM | (μM) |
| 523719 | 18 | 40 | 56 | 73 | 83 | 2.1 |
| 523720 | 36 | 46 | 59 | 64 | 89 | 1.5 |
| 523724 | 44 | 60 | 75 | 81 | 87 | 0.7 |
| 523735 | 11 | 40 | 60 | 78 | 84 | 2.1 |
| 523740 | 17 | 47 | 61 | 80 | 81 | 1.8 |
| 523752 | 25 | 31 | 38 | 70 | 84 | 2.5 |
| 523758 | 23 | 48 | 58 | 72 | 80 | 1.8 |
| 523763 | 2 | 24 | 48 | 64 | 75 | 3.3 |
| 523764 | 22 | 49 | 45 | 73 | 75 | 2.1 |
| 523765 | 42 | 40 | 57 | 79 | 87 | 1.4 |
| 523767 | 43 | 53 | 56 | 69 | 79 | 1.2 |
| 523774 | 36 | 52 | 71 | 81 | 89 | 1.1 |
| 523778 | 15 | 45 | 59 | 75 | 79 | 2.0 |
| 523783 | 5 | 30 | 48 | 66 | 83 | 2.9 |

TABLE 42

| | 0.625 | 1.250 | 2.50 | 5.00 | 10.00 | IC₅₀ |
|---|---|---|---|---|---|---|
| ISIS No | μM | μM | μM | μM | μM | (μM) |
| 532151 | 40 | 45 | 64 | 71 | 82 | 1.3 |
| 532158 | 28 | 47 | 63 | 70 | 87 | 1.6 |
| 532164 | 36 | 47 | 64 | 75 | 89 | 1.3 |
| 532171 | 35 | 47 | 50 | 69 | 89 | 1.6 |
| 532175 | 27 | 38 | 43 | 75 | 87 | 2.1 |
| 532181 | 21 | 56 | 63 | 69 | 80 | 1.7 |
| 532186 | 28 | 49 | 62 | 73 | 91 | 1.5 |
| 532188 | 40 | 52 | 73 | 75 | 90 | 1.0 |
| 532223 | 22 | 34 | 53 | 71 | 90 | 2.2 |
| 532235 | 35 | 31 | 48 | 68 | 73 | 2.3 |
| 532241 | 6 | 24 | 29 | 51 | 72 | 4.5 |
| 532248 | 19 | 37 | 47 | 73 | 84 | 2.3 |
| 532254 | 56 | 56 | 72 | 85 | 90 | 0.5 |
| 532316 | 32 | 55 | 50 | 78 | 90 | 1.5 |

TABLE 43

| | 0.625 | 1.250 | 2.50 | 5.00 | 10.00 | IC₅₀ |
|---|---|---|---|---|---|---|
| ISIS No | μM | μM | μM | μM | μM | (μM) |
| 532304 | 44 | 57 | 68 | 78 | 73 | 0.7 |
| 532395 | 47 | 62 | 82 | 91 | 96 | 0.6 |
| 532401 | 70 | 83 | 91 | 94 | 96 | <0.6 |
| 532410 | 56 | 71 | 85 | 90 | 96 | <0.6 |
| 532411 | 88 | 93 | 96 | 97 | 98 | <0.6 |
| 532420 | 61 | 67 | 82 | 85 | 96 | <0.6 |
| 532436 | 48 | 49 | 77 | 90 | 97 | 0.8 |
| 532468 | 42 | 67 | 82 | 89 | 94 | 0.6 |
| 532476 | 32 | 58 | 75 | 84 | 90 | 1.1 |
| 532482 | 5 | 26 | 56 | 71 | 87 | 2.6 |
| 532490 | 18 | 47 | 55 | 69 | 86 | 2.0 |
| 532501 | 4 | 22 | 43 | 59 | 77 | 3.5 |
| 532507 | 39 | 63 | 66 | 83 | 89 | 0.9 |
| 532526 | 30 | 48 | 67 | 82 | 88 | 1.4 |

TABLE 44

| | 0.625 | 1.250 | 2.50 | 5.00 | 10.00 | IC₅₀ |
|---|---|---|---|---|---|---|
| ISIS No | μM | μM | μM | μM | μM | (μM) |
| 533121 | 59 | 67 | 78 | 83 | 87 | 0.2 |
| 533122 | 48 | 73 | 78 | 84 | 90 | 0.4 |
| 533125 | 47 | 61 | 74 | 89 | 89 | 0.6 |
| 533136 | 5 | 25 | 58 | 79 | 90 | 2.4 |
| 533156 | 37 | 48 | 69 | 77 | 87 | 1.2 |
| 533161 | 28 | 67 | 77 | 89 | 90 | 1.0 |
| 533178 | 30 | 60 | 72 | 90 | 92 | 1.1 |
| 533179 | 37 | 66 | 76 | 76 | 87 | 0.8 |
| 533188 | 32 | 64 | 74 | 80 | 90 | 1.0 |
| 533189 | 49 | 66 | 77 | 81 | 81 | 0.4 |
| 533193 | 26 | 48 | 69 | 75 | 85 | 1.5 |
| 533233 | 39 | 60 | 59 | 84 | 93 | 1.0 |
| 533234 | 45 | 69 | 84 | 91 | 94 | 0.5 |
| 533235 | 28 | 49 | 69 | 82 | 90 | 1.4 |

TABLE 45

| | 0.625 | 1.250 | 2.50 | 5.00 | 10.00 | IC₅₀ |
|---|---|---|---|---|---|---|
| ISIS No | μM | μM | μM | μM | μM | (μM) |
| 533256 | 47 | 72 | 86 | 90 | 94 | <0.6 |
| 533257 | 63 | 77 | 88 | 91 | 96 | <0.6 |
| 533258 | 66 | 81 | 88 | 95 | 95 | <0.6 |
| 533259 | 48 | 70 | 84 | 90 | 93 | <0.6 |
| 533262 | 44 | 66 | 79 | 90 | 96 | 0.7 |
| 533265 | 59 | 74 | 85 | 93 | 96 | <0.6 |
| 533269 | 25 | 55 | 74 | 86 | 87 | 1.2 |
| 533270 | 34 | 59 | 73 | 86 | 95 | 1.0 |
| 533271 | 63 | 82 | 88 | 92 | 92 | <0.6 |
| 533291 | 14 | 46 | 64 | 84 | 89 | 1.8 |
| 533301 | 49 | 61 | 75 | 83 | 91 | 0.6 |
| 533315 | 22 | 39 | 73 | 76 | 91 | 1.7 |
| 533317 | 26 | 53 | 68 | 85 | 94 | 1.3 |
| 533318 | 29 | 40 | 46 | 77 | 91 | 1.9 |

TABLE 46

| | 0.625 | 1.250 | 2.50 | 5.00 | 10.00 | IC₅₀ |
|---|---|---|---|---|---|---|
| ISIS No | μM | μM | μM | μM | μM | (μM) |
| 533280 | 58 | 64 | 77 | 82 | 87 | 0.3 |
| 533316 | 35 | 55 | 68 | 87 | 91 | 1.1 |
| 533326 | 34 | 68 | 76 | 89 | 96 | 0.8 |
| 533328 | 54 | 55 | 79 | 83 | 92 | 0.5 |
| 533329 | 46 | 62 | 72 | 83 | 95 | 0.7 |
| 533330 | 56 | 75 | 83 | 91 | 94 | 0.3 |
| 533331 | 54 | 61 | 80 | 86 | 89 | 0.4 |
| 533352 | 54 | 62 | 79 | 83 | 89 | 0.4 |
| 533364 | 52 | 73 | 83 | 91 | 94 | 0.4 |
| 533898 | 17 | 47 | 63 | 78 | 87 | 1.8 |
| 533908 | 35 | 58 | 74 | 82 | 87 | 1 |
| 533916 | 22 | 46 | 72 | 78 | 88 | 1.6 |
| 533932 | 51 | 62 | 70 | 79 | 80 | 0.5 |
| 533937 | 20 | 40 | 61 | 79 | 85 | 1.9 |

### Example 5

### Dose-Dependent Antisense Inhibition of Human GHR in Hep3B Cells by MOE Gapmers

[0399] Gapmers from studies described above exhibiting significant in vitro inhibition of GHR mRNA were selected and tested at various doses in Hep3B cells. The antisense oligonucleotides were tested in a series of experiments that had similar culture conditions. The results for each experiment are presented in separate tables shown below. Cells were plated at a density of 20,000 cells per well and transfected using electroporation with 0.3125 μM, 0.625 μM, 1.25 μM, 2.50 μM, 5.00 μM and 10.00 μM concentrations of antisense oligonucleotide, as specified in the Tables below. After a treatment period of approximately 16 hours, RNA was isolated from the cells and GHR mRNA levels were measured by quantitative real-time PCR. Human primer probe set RTS3437_MGB was used to measure mRNA levels. GHR mRNA levels were adjusted according to total RNA content, as measured by RIBOGREEN®. Results are presented as percent inhibition of GHR, relative to untreated control cells.

[0400] The half maximal inhibitory concentration (IC₅₀) of each oligonucleotide is also presented. GHR mRNA levels were significantly reduced in a dose-dependent manner in antisense oligonucleotide treated cells.

TABLE 47

| | 0.3125 | 0.625 | 1.250 | 2.50 | 5.00 | 10.00 | IC₅₀ |
|---|---|---|---|---|---|---|---|
| ISIS No | μM | μM | μM | μM | μM | μM | (μM) |
| 523577 | 0 | 16 | 33 | 59 | 72 | 94 | 2.2 |
| 523633 | 15 | 33 | 66 | 73 | 82 | 86 | 1.1 |
| 523764 | 11 | 33 | 50 | 68 | 78 | 83 | 1.5 |
| 523794 | 12 | 30 | 33 | 56 | 76 | 82 | 1.9 |
| 523805 | 21 | 48 | 66 | 78 | 85 | 92 | 0.8 |
| 523810 | 18 | 36 | 61 | 80 | 89 | 90 | 1.0 |
| 523814 | 13 | 35 | 52 | 67 | 81 | 88 | 1.3 |
| 523819 | 11 | 30 | 57 | 72 | 81 | 89 | 1.3 |
| 523820 | 0 | 15 | 43 | 61 | 84 | 92 | 1.8 |
| 523824 | 21 | 27 | 59 | 72 | 84 | 90 | 1.2 |

TABLE 48

| | 0.3125 | 0.625 | 1.250 | 2.50 | 5.00 | 10.00 | IC₅₀ |
|---|---|---|---|---|---|---|---|
| ISIS No | μM | μM | μM | μM | μM | μM | (μM) |
| 539302 | 34 | 41 | 56 | 83 | 83 | 96 | 0.8 |
| 539321 | 30 | 32 | 76 | 73 | 80 | 94 | 0.8 |
| 539322 | 22 | 36 | 57 | 72 | 78 | 94 | 1.1 |
| 539355 | 23 | 42 | 48 | 72 | 71 | 88 | 1.2 |
| 539359 | 21 | 38 | 48 | 73 | 78 | 92 | 1.2 |
| 539320 | 14 | 32 | 53 | 72 | 82 | 91 | 1.3 |
| 539341 | 3 | 19 | 35 | 56 | 78 | 89 | 2.0 |
| 539342 | 6 | 18 | 33 | 51 | 70 | 83 | 2.3 |
| 539356 | 0 | 0 | 21 | 45 | 73 | 94 | 2.7 |
| 539358 | 0 | 15 | 23 | 50 | 52 | 91 | 2.9 |

TABLE 49

| | 0.3125 | 0.625 | 1.250 | 2.50 | 5.00 | 10.00 | IC₅₀ |
|---|---|---|---|---|---|---|---|
| ISIS No | μM | μM | μM | μM | μM | μM | (μM) |
| 539339 | 22 | 37 | 52 | 77 | 90 | 92 | 1.0 |
| 539360 | 28 | 49 | 72 | 82 | 95 | 97 | 0.7 |
| 539361 | 36 | 56 | 75 | 86 | 95 | 98 | 0.5 |
| 539362 | 24 | 26 | 63 | 77 | 91 | 97 | 1.0 |
| 539375 | 21 | 29 | 39 | 63 | 77 | 91 | 1.5 |
| 539378 | 8 | 42 | 64 | 85 | 92 | 97 | 1.0 |
| 539379 | 43 | 59 | 80 | 89 | 96 | 98 | 0.3 |
| 539380 | 61 | 73 | 90 | 95 | 98 | 98 | 0.1 |
| 539383 | 30 | 49 | 75 | 87 | 97 | 98 | 0.6 |
| 539403 | 48 | 55 | 75 | 85 | 94 | 96 | 0.3 |
| 539432 | 36 | 42 | 69 | 79 | 88 | 95 | 0.7 |

TABLE 50

| | 0.3125 | 0.625 | 1.250 | 2.50 | 5.00 | 10.00 | IC₅₀ |
|---|---|---|---|---|---|---|---|
| ISIS No | μM | μM | μM | μM | μM | μM | (μM) |
| 539376 | 34 | 46 | 62 | 82 | 94 | 98 | 0.7 |
| 539389 | 53 | 58 | 78 | 86 | 94 | 97 | 0.2 |
| 539392 | 1 | 19 | 26 | 68 | 81 | 94 | 1.9 |
| 539399 | 27 | 52 | 65 | 78 | 92 | 98 | 0.7 |
| 539400 | 7 | 26 | 43 | 59 | 88 | 95 | 1.6 |
| 539401 | 32 | 39 | 77 | 90 | 92 | 95 | 0.6 |
| 539404 | 22 | 59 | 77 | 87 | 93 | 95 | 0.6 |
| 539413 | 16 | 33 | 53 | 82 | 86 | 96 | 1.1 |
| 539415 | 4 | 44 | 56 | 74 | 81 | 94 | 1.2 |
| 539416 | 37 | 61 | 70 | 85 | 92 | 95 | 0.4 |
| 539433 | 31 | 52 | 70 | 85 | 87 | 94 | 0.6 |

### Example 6

### Antisense Inhibition of Human Growth Hormone Receptor in Hep3B Cells by Deoxy, MOE and cEt Gapmers

[0401] Additional antisense oligonucleotides were designed targeting a growth hormone receptor (GHR) nucleic acid and were tested for their effects on GHR mRNA in vitro. The antisense oligonucleotides were tested in a series of experiments that had similar culture conditions. The results for each experiment are presented in separate tables shown below. Cultured Hep3B cells at a density of 20,000 cells per well were transfected using electroporation with 5,000 nM antisense oligonucleotide. After a treatment period of approximately 24 hours, RNA was isolated from the cells and GHR mRNA levels were measured by quantitative real-time PCR. Human primer probe set RTS3437_MGB was used to measure mRNA levels. GHR mRNA levels were adjusted according to total RNA content, as measured by RIBOGREEN®. Results are presented as percent inhibition of GHR, relative to untreated control cells.

[0402] The newly designed chimeric antisense oligonucleotides in the Tables below were designed as deoxy, MOE, and cEt gapmers. The deoxy, MOE and cEt oligonucleotides are 16 nucleosides in length wherein the nucleoside have either a MOE sugar modification, an cEt sugar modification, or a deoxy modification. The ‘Chemistry’ column describes the sugar modifications of each oligonucleotide. ‘k’ indicates a cEt sugar modification; ‘d’ indicates deoxyribose; and ‘e’ indicates a MOE modification. The internucleoside linkages throughout each gapmer are phosphorothioate (P═S) linkages. All cytosine residues throughout each gapmer are 5-methylcytosines. “Start site” indicates the 5′-most nucleoside to which the gapmer is targeted in the human gene sequence. “Stop site” indicates the 3′-most nucleoside to which the gapmer is targeted human gene sequence. Each gapmer listed in the Tables below is targeted to either the human GHR mRNA, designated herein as SEQ ID NO: 1 (GENBANK Accession No. NM_000163.4) or the human GHR genomic sequence, designated herein as SEQ ID NO: 2 (GENBANK Accession No. NT_006576.16 truncated from nucleotides 42411001 to 42714000). ‘n/a’ indicates that the antisense oligonucleotide does not target that particular gene sequence with 100% complementarity. In case the sequence alignment for a target gene in a particular table is not shown, it is understood that none of the oligonucleotides presented in that table align with 100% complementarity with that target gene.

TABLE 51
Inhibition of GHR mRNA by deoxy, MOE and cEt gapmers targeting
intronic and exonic regions of SEQ ID NO: 1 and 2

| | SEQ | | | | | SEQ | |
|---|---|---|---|---|---|---|---|
| | ID | | | | | ID | |
| | NO: 1 | | | | | NO: 2 | SEQ |
| ISIS | Start | Target | | | % | Start | ID |
| NO | Site | Region | Sequence | Chemistry | inhibition | Site | NO |
| 541262 | n/a | Intron 2 | TTGGTTTGTCAATCCT | eekddddddddddkke | 84 | 156891 | 1370 |
| 541263 | 164 | Intron 1 | CCGAGCTTCGCCTCTG | eekddddddddddkke | 89 | 3040 | 1371 |
| 541264 | 167 | Intron 1 | CCTCCGAGCTTCGCCT | eekddddddddddkke | 90 | 3043 | 1372 |
| 541265 | 170 | Junction | GGACCTCCGAGCTTCG | eekddddddddddkke | 89 | n/a | 1373 |
| | | spanning | | | | | |
| | | two exons | | | | | |
| 541266 | 176 | Junction | CCTGTAGGACCTCCGA | eekddddddddddkke | 83 | n/a | 1374 |
| | | spanning | | | | | |
| | | two exons | | | | | |
| 541268 | 214 | Exon 2 | CCAGTGCCAAGGTCAA | eekddddddddddkke | 87 | 144998 | 1375 |
| 541269 | 226 | Exon 2 | CACTTGATCCTGCCAG | eekddddddddddkke | 67 | 145010 | 1376 |
| 541270 | 244 | Exon 2 | CACTTCCAGAAAAAGC | eekddddddddddkke | 34 | 145028 | 1377 |
| 541278 | 365 | Exon 4/ | GTCTCTCGCTCAGGTG | eekddddddddddkke | 77 | 268028 | 1378 |
| | | Intron 3 | | | | | |
| 541279 | 368 | Exon 4/ | AAAGTCTCTCGCTCAG | eekddddddddddkke | 76 | 268031 | 1379 |
| | | Intron 3 | | | | | |
| 541280 | 373 | Exon 4/ | ATGAAAAAGTCTCTCG | eekddddddddddkke | 66 | 268036 | 1380 |
| | | Intron 3 | | | | | |
| 541283 | 445 | exon | TCCTTCTGGTATAGAA | eekddddddddddkke | 37 | n/a | 1381 |
| | | 2-exon 3 | | | | | |
| | | junction | | | | | |
| 541288 | 554 | Exon 5 | CAATAAGGTATCCAGA | eekddddddddddkke | 49 | 274114 | 1382 |
| 541289 | 561 | Exon 5 | CTTGATACAATAAGGT | eekddddddddddkke | 66 | 274121 | 1383 |
| 541290 | 569 | Exon 5 | CTAGTTAGCTTGATAC | eekddddddddddkke | 61 | 274129 | 1384 |
| 541293 | 628 | exon | GATCTGGTTGCACTAT | eekddddddddddkke | 57 | n/a | 1385 |
| | | 3-exon 4 | | | | | |
| | | junction | | | | | |
| 541294 | 639 | Exon 6 | GGCAATGGGTGGATCT | eekddddddddddkke | 38 | 278933 | 1386 |
| 541295 | 648 | Exon 6 | CCAGTTGAGGGCAATG | eekddddddddddkke | 67 | 278942 | 1387 |
| 541296 | 654 | Exon 6 | TAAAGTCCAGTTGAGG | eekddddddddddkke | 43 | 278948 | 1388 |
| 541301 | 924 | Exon 7 | TACATAGAGCACCTCA | eekddddddddddkke | 86 | 290422 | 1389 |
| 541302 | 927 | Exon 7 | TGTTACATAGAGCACC | eekddddddddddkke | 78 | 290425 | 1390 |
| 541303 | 930 | Exon 7 | AAGTGTTACATAGAGC | eekddddddddddkke | 59 | 290428 | 1391 |
| 541304 | 958 | Exon 7 | CTTCACATGTAAATTG | eekddddddddddkke | 26 | 290456 | 1392 |
| 541305 | 981 | Exon 8 | GAGCCATGGAAAGTAG | eekddddddddddkke | 66 | 292535 | 1393 |
| 541310 | 1127 | Exon | CCTTCCTTGAGGAGAT | eekddddddddddkke | 26 | n/a | 1394 |
| | | 7-exon 8 | | | | | |
| | | junction | | | | | |
| 541320 | 1317 | Exon 10 | CTTCACCCCTAGGTTA | eekddddddddddkke | 38 | 297734 | 1395 |
| 541321 | 1322 | Exon 10 | CCATCCTTCACCCCTA | eekddddddddddkke | 81 | 297739 | 1396 |
| 541322 | 1326 | Exon 10 | GTCGCCATCCTTCACC | eekddddddddddkke | 79 | 297743 | 1397 |
| 541323 | 1331 | Exon 10 | CCAGAGTCGCCATCCT | eekddddddddddkke | 64 | 297748 | 1398 |
| 541325 | 1420 | Exon 10 | GTGGCTGAGCAACCTC | eekddddddddddkke | 79 | 297837 | 1399 |
| 541326 | 1434 | Exon 10 | CCCTTTTAACCTCTGT | eekddddddddddkke | 67 | 297851 | 1400 |
| 541331 | 1492 | Exon 10 | CATCATGATAAGGTGA | eekddddddddddkke | 16 | 297909 | 1401 |
| 541332 | 1526 | Exon 10 | TGGATAACACTGGGCT | eekddddddddddkke | 30 | 297943 | 1402 |
| 541333 | 1532 | Exon 10 | TCTGCTTGGATAACAC | eekddddddddddkke | 63 | 297949 | 1403 |
| 541335 | 1597 | Exon 10 | GAATATGGGCAGCTTG | eekddddddddddkke | 33 | 298014 | 1404 |
| 541336 | 1601 | Exon 10 | AGCTGAATATGGGCAG | eekddddddddddkke | 34 | 298018 | 1405 |
| 541337 | 1607 | Exon 10 | TTGCTTAGCTGAATAT | eekddddddddddkke | 39 | 298024 | 1406 |
| 541338 | 1611 | Exon 10 | TGGATTGCTTAGCTGA | eekddddddddddkke | 79 | 298028 | 1407 |
| 541339 | 1614 | Exon 10 | ACTTGGATTGCTTAGC | eekddddddddddkke | 73 | 298031 | 1408 |

### Example 7

### Antisense Inhibition of Human Growth Hormone Receptor in Hep3B Cells by Deoxy, MOE and cEt Gapmers

[0403] Additional antisense oligonucleotides were designed targeting a growth hormone receptor (GHR) nucleic acid and were tested for their effects on GHR mRNA in vitro. The antisense oligonucleotides were tested in a series of experiments that had similar culture conditions. The results for each experiment are presented in separate tables shown below. Cultured Hep3B cells at a density of 20,000 cells per well were transfected using electroporation with 4,500 nM antisense oligonucleotide. After a treatment period of approximately 24 hours, RNA was isolated from the cells and GHR mRNA levels were measured by quantitative real-time PCR. Human primer probe set RTS3437_MGB was used to measure mRNA levels. GHR mRNA levels were adjusted according to total RNA content, as measured by RIBOGREEN®. Results are presented as percent inhibition of GHR, relative to untreated control cells.

[0404] The newly designed chimeric antisense oligonucleotides in the Tables below were designed as deoxy, MOE, and cEt gapmers. The deoxy, MOE and cEt oligonucleotides are 16 nucleosides in length wherein the nucleoside have either a MOE sugar modification, a cEt sugar modification, or a deoxy modification. The ‘Chemistry’ column describes the sugar modifications of each oligonucleotide. ‘k’ indicates a cEt sugar modification; indicates deoxyribose; and ‘e’ indicates a MOE modification. The internucleoside linkages throughout each gapmer are phosphorothioate (P═S) linkages. All cytosine residues throughout each gapmer are 5-methylcytosines. “Start site” indicates the 5′-most nucleoside to which the gapmer is targeted in the human gene sequence. “Stop site” indicates the 3′-most nucleoside to which the gapmer is targeted human gene sequence. Each gapmer listed in the Tables below is targeted to either the human GHR mRNA, designated herein as SEQ ID NO: 1 (GENBANK Accession No. NM_000163.4) or the human GHR genomic sequence, designated herein as SEQ ID NO: 2 (GENBANK Accession No. NT_006576.16 truncated from nucleotides 42411001 to 42714000). ‘n/a’ indicates that the antisense oligonucleotide does not target that particular gene sequence with 100% complementarity. In case the sequence alignment for a target gene in a particular table is not shown, it is understood that none of the oligonucleotides presented in that table align with 100% complementarity with that target gene. The oligonucleotides of Table 54 do not target SEQ ID NOs: 1 or 2, but instead target variant gene sequences SEQ ID NO: 4 (GENBANK Accession No. DR006395.1) or SEQ ID NO: 7 (the complement of GENBANK Accession No. AA398260.1).

TABLE 52
Inhibition of GHR mRNA by deoxy, MOE and cEt gapmers
targeting intronic and exonic regions of SEQ ID
NO: 1 and 2

| | |
|---|---|
| SEQ | SEQ |
| ID | ID |

| | | | | | | | |
|---|---|---|---|---|---|---|---|
| | NO: 1 | | | | % | NO: 2 | SEQ |
| ISIS | Start | Target | | | inhi- | Start | ID |
| NO | Site | Region | Sequence | Chemistry | bition | Site | NO |

| | | | | | | | |
|---|---|---|---|---|---|---|---|
| 541262 | n/a | Intron 2 | TTGGTTTGTCAATCCT | eekddddddddddkke | 86 | 156891 | 1370 |
| 541340 | 1619 | Exon 10 | AGTGAACTTGGATTGC | eekddddddddddkke | 73 | 298036 | 1409 |
| 541341 | 1641 | Exon 10 | GGCATAAAAGTCGATG | eekddddddddddkke | 41 | 298058 | 1410 |
| 541342 | 1644 | Exon 10 | CTGGGCATAAAAGTCG | eekddddddddddkke | 33 | 298061 | 1411 |
| 541343 | 1683 | Exon 10 | GGAAAGGACCACACTA | eekddddddddddkke | 34 | 298100 | 1412 |
| 541344 | 1746 | Exon 10 | GAGTGAGACCATTTCC | eekddddddddddkke | 65 | 298163 | 1413 |
| 541345 | 1827 | Exon 10 | GATGTGAGGAGCCACA | eekddddddddddkke | 54 | 298244 | 1414 |
| 541346 | 1830 | Exon 10 | CTTGATGTGAGGAGCC | eekddddddddddkke | 70 | 298247 | 1415 |
| 541347 | 1835 | Exon 10 | TCAACCTTGATGTGAG | eekddddddddddkke | 38 | 298252 | 1416 |
| 541348 | 1839 | Exon 10 | TGATTCAACCTTGATG | eekddddddddddkke | 39 | 298256 | 1417 |
| 541349 | 1842 | Exon 10 | GTGTGATTCAACCTTG | eekddddddddddkke | 74 | 298259 | 1418 |
| 541350 | 1845 | Exon 10 | TATGTGTGATTCAACC | eekddddddddddkke | 58 | 298262 | 1419 |
| 541351 | 1949 | Exon 10 | GGCATCTCAGAACCTG | eekddddddddddkke | 41 | 298366 | 1420 |
| 541352 | 1965 | Exon 10 | GGTATAGTCTGGGACA | eekddddddddddkke | 18 | 298382 | 1421 |
| 541353 | 1969 | Exon 10 | TGGAGGTATAGTCTGG | eekddddddddddkke | 17 | 298386 | 1422 |
| 541354 | 1972 | Exon 10 | GAATGGAGGTATAGTC | eekddddddddddkke | 0 | 298389 | 1423 |
| 541355 | 1975 | Exon 10 | TATGAATGGAGGTATA | eekddddddddddkke | 0 | 298392 | 1424 |
| 541356 | 1978 | Exon 10 | CTATATGAATGGAGGT | eekddddddddddkke | 30 | 298395 | 1425 |
| 541357 | 1981 | Exon 10 | GTACTATATGAATGGA | eekddddddddddkke | 43 | 298398 | 1426 |
| 541358 | 1987 | Exon 10 | GGGACTGTACTATATG | eekddddddddddkke | 12 | 298404 | 1427 |
| 541369 | 2306 | Exon 10 | TTACATTGCACAATAG | eekddddddddddkke | 21 | 298723 | 1428 |
| 541373 | 2667 | Exon 10 | TAGCCATGCTTGAAGT | eekddddddddddkke | 34 | 299084 | 1429 |
| 541374 | 2686 | Exon 10 | TGTGTAGTGTAATATA | eekddddddddddkke | 10 | 299103 | 1430 |
| 541375 | 2690 | Exon 10 | ACAGTGTGTAGTGTAA | eekddddddddddkke | 82 | 299107 | 1431 |
| 541376 | 2697 | Exon 10 | GCAGTACACAGTGTGT | eekddddddddddkke | 46 | 299114 | 1432 |
| 541377 | 2700 | Exon 10 | ACTGCAGTACACAGTG | eekddddddddddkke | 32 | 299117 | 1433 |
| 541378 | 2740 | Exon 10 | TTAGACTGTAGTTGCT | eekddddddddddkke | 25 | 299157 | 1434 |
| 541379 | 2746 | Exon 10 | CCAGCTTTAGACTGTA | eekddddddddddkke | 69 | 299163 | 1435 |
| 541380 | 2750 | Exon 10 | TAAACCAGCTTTAGAC | eekddddddddddkke | 20 | 299167 | 1436 |
| 541381 | 2755 | Exon 10 | AACATTAAACCAGCTT | eekddddddddddkke | 64 | 299172 | 1437 |
| 541382 | 2849 | Exon 10 | ACTACAATCATTTTAG | eekddddddddddkke | 0 | 299266 | 1438 |
| 541383 | 2853 | Exon 10 | GATTACTACAATCATT | eekddddddddddkke | 0 | 299270 | 1439 |
| 541384 | 2859 | Exon 10 | AATGCAGATTACTACA | eekddddddddddkke | 46 | 299276 | 1440 |
| 541385 | 2865 | Exon 10 | TCCAATAATGCAGATT | eekddddddddddkke | 52 | 299282 | 1441 |
| 541386 | 2941 | Exon 10 | GTTGATCTGTGCAAAC | eekddddddddddkke | 74 | 299358 | 1442 |
| 541389 | 3037 | Exon 10 | TCTACTTCTCTTAGCA | eekddddddddddkke | 50 | 299454 | 1443 |
| 541393 | 3215 | Exon 10 | GCTTCTTGTACCTTAT | eekddddddddddkke | 84 | 299632 | 1444 |
| 541394 | 3237 | Exon 10 | GATTTGCTTCAACTTA | eekddddddddddkke | 47 | 299654 | 1445 |
| 541395 | 3305 | Exon 10 | GGTTATAGGCTGTGAA | eekddddddddddkke | 0 | 299722 | 1446 |
| 541396 | 3308 | Exon 10 | TCTGGTTATAGGCTGT | eekddddddddddkke | 88 | 299725 | 1447 |
| 541397 | 3311 | Exon 10 | GTGTCTGGTTATAGGC | eekddddddddddkke | 56 | 299728 | 1448 |
| 541398 | 3316 | Exon 10 | AGTATGTGTCTGGTTA | eekddddddddddkke | 76 | 299733 | 1449 |
| 541399 | 3371 | Exon 10 | GGGACTGAAAACCTTG | eekddddddddddkke | 50 | 299788 | 1450 |
| 541400 | 3975 | Exon 10 | AGTATTCTTCACTGAG | eekddddddddddkke | 36 | 300392 | 1451 |
| 541401 | 4044 | Exon 10 | GCGATAAATGGGAAAT | eekddddddddddkke | 36 | 300461 | 1452 |
| 541402 | 4048 | Exon 10 | GTCTGCGATAAATGGG | eekddddddddddkke | 52 | 300465 | 1453 |
| 541403 | 4058 | Exon 10 | CCTAAAAAAGGTCTGC | eekddddddddddkke | 51 | 300475 | 1454 |
| 541404 | 4072 | Exon 10 | CATTAAGCTTGCTTCC | eekddddddddddkke | 53 | 300489 | 1455 |

TABLE 53
Inhibition of GHR mRNA by deoxy, MOE and cEt gapmers targeting
intronic and exonic regions of SEQ ID NO: 1 and 2

| | SEQ | | | | | SEQ | |
|---|---|---|---|---|---|---|---|
| | ID | | | | | ID | |
| | NO: 1 | | | | | NO: 2 | SEQ |
| ISIS | Start | | | | % | Start | ID |
| NO | Site | Target Region | Sequence | Chemistry | inhibition | Site | NO |
| 541262 | n/a | Intron 2 | TTGGTTTGTCAATCCT | eekddddddddddkke | 85 | 156891 | 1370 |
| 541421 | 4418 | Exon 10 | CACAACTAGTCATACT | eekddddddddddkke | 42 | 300835 | 1456 |
| 541422 | 4428 | Exon 10 | AACTGCCAGACACAAC | eekddddddddddkke | 68 | 300845 | 1457 |
| 541423 | 4431 | Exon 10 | ATAAACTGCCAGACAC | eekddddddddddkke | 86 | 300848 | 1458 |
| 541424 | 4503 | Exon 10 | TATCAGGAATCCAAGA | eekddddddddddkke | 11 | 300920 | 1459 |
| 541425 | 4521 | Exon 10 | TTGATAACAGAAGCAC | eekddddddddddkke | 16 | 300938 | 1460 |
| 541426 | 4528 | Exon 10 | TTGGTGTTTGATAACA | eekddddddddddkke | 31 | 300945 | 1461 |
| 541427 | 4531 | Exon 10 | ATGTTGGTGTTTGATA | eekddddddddddkke | 32 | 300948 | 1462 |
| 541429 | 30 | Exon 1 | CCGCCACTGTAGCAGC | eekddddddddddkke | 77 | 2906 | 1463 |
| 541430 | 35 | Exon 1 | CGCCACCGCCACTGTA | eekddddddddddkke | 88 | 2911 | 1464 |
| 541431 | 63 | Exon 1 | GCCGCCCGGGCTCAGC | eekddddddddddkke | 86 | 2939 | 1465 |
| 541432 | 67 | Exon 1 | CGCCGCCGCCCGGGCT | eekddddddddddkke | 61 | 2943 | 1466 |
| 541433 | 144 | Exon 1 | GAGAGCGCGGGTTCGC | eekddddddddddkke | 57 | 3020 | 1467 |
| 541434 | n/a | Exon 1/Intron 1 | CTACTGACCCCAGTTC | eekddddddddddkke | 80 | 3655 | 1468 |
| 541435 | n/a | Exon 1/Intron 1 | TCACTCTACTGACCCC | eekddddddddddkke | 90 | 3660 | 1469 |
| 541436 | n/a | Exon 1/Intron 1 | TCATGCGGACTGGTGG | eekddddddddddkke | 56 | 3679 | 1470 |
| 541437 | n/a | Exon 3/Intron 3 | ATGTGAGCATGGACCC | eekddddddddddkke | 82 | 225438 | 1471 |
| 541438 | n/a | Exon 3/Intron 3 | TCTTGATATGTGAGCA | eekddddddddddkke | 93 | 225445 | 1472 |
| 541439 | n/a | Exon 3/Intron 3 | TTCAAGTTGGTGAGCT | eekddddddddddkke | 72 | 226788 | 1473 |
| 541440 | n/a | Exon 3/Intron 3 | TGCTTCCTTCAAGTTG | eekddddddddddkke | 68 | 226795 | 1474 |
| 541441 | n/a | Exon 3/Intron 3 | TGTAATTTCATTCATG | eekddddddddddkke | 62 | 226809 | 1475 |
| 541442 | n/a | Exon 3/Intron 3 | CCTTTTGCCAAGAGCA | eekddddddddddkke | 85 | 226876 | 1476 |
| 541443 | n/a | Exon 3/Intron 3 | GATCCTTTTGCCAAGA | eekddddddddddkke | 77 | 226879 | 1477 |
| 541444 | n/a | Exon 3/Intron 3 | GCTAGTAATGTTACAT | eekddddddddddkke | 68 | 238331 | 1478 |
| 541445 | n/a | Exon 3/Intron 3 | GCAACTTGCTAGTAAT | eekddddddddddkke | 65 | 238338 | 1479 |
| 541446 | n/a | Exon 3/Intron 3 | TGTGCAACTTGCTAGT | eekddddddddddkke | 44 | 238341 | 1480 |
| 541447 | n/a | Exon 3/Intron 3 | GGATTTCAGTTTGAAT | eekddddddddddkke | 0 | 238363 | 1481 |
| 541448 | n/a | Exon 3/Intron 3 | CTCAGAGCCTTGGTAG | eekddddddddddkke | 65 | 238428 | 1482 |
| 541449 | n/a | Exon 1/Intron 1 | CAAACGCGCAAAAGAC | eekddddddddddkke | 1 | 3608 | 1483 |
| 541450 | n/a | Exon 1/Intron 1 | GCCCGCACAAACGCGC | eekddddddddddkke | 11 | 3615 | 1484 |
| 541451 | n/a | Exon 1/Intron 1 | GGTTAAAGAAGTTGCT | eekddddddddddkke | 60 | 93190 | 1485 |
| 541452 | n/a | Exon 1/Intron 1 | CCCAGTGAATTCAGCA | eekddddddddddkke | 85 | 93245 | 1486 |
| 541453 | n/a | Exon 1/Intron 1 | GCGCCCAGTGAATTCA | eekddddddddddkke | 74 | 93248 | 1487 |
| 541454 | n/a | Exon 1/Intron 1 | AAGATGCGCCCAGTGA | eekddddddddddkke | 71 | 93253 | 1488 |
| 541455 | n/a | Exon 1/Intron 1 | TGTAAGATGCGCCCAG | eekddddddddddkke | 75 | 93256 | 1489 |
| 541456 | n/a | Exon 1/Intron 1 | AATTACTTGTAAGATG | eekddddddddddkke | 15 | 93263 | 1490 |
| 541457 | n/a | Exon 1/Intron 1 | CCCAGAAGGCACTTGT | eekddddddddddkke | 61 | 93302 | 1491 |
| 541458 | n/a | Exon 1/Intron 1 | TTGCAGAACAAATCTT | eekddddddddddkke | 3 | 93333 | 1492 |
| 541459 | n/a | Exon 1/Intron 1 | CATGGAAGATTTGCAG | eekddddddddddkke | 17 | 93343 | 1493 |
| 541460 | n/a | Exon 1/Intron 1 | GGTCATGGAAGATTTG | eekddddddddddkke | 57 | 93346 | 1494 |
| 541461 | n/a | Exon 1/Intron 1 | GACCTTGGTCATGGAA | eekddddddddddkke | 51 | 93352 | 1495 |
| 541462 | n/a | Exon 1/Intron 1 | TGCCAATCCAAAGAGG | eekddddddddddkke | 34 | 93369 | 1496 |
| 541463 | n/a | Exon 1/Intron 1 | GGGTCTGCCAATCCAA | eekddddddddddkke | 67 | 93374 | 1497 |
| 541464 | n/a | Exon 1/Intron 1 | TCCCTGGGTCTGCCAA | eekddddddddddkke | 82 | 93379 | 1498 |
| 541465 | n/a | Exon 1/Intron 1 | AAGTGTGAATTTATCT | eekddddddddddkke | 16 | 93408 | 1499 |
| 541466 | n/a | Exon 1/Intron 1 | GGAGATCTCAACAAGG | eekddddddddddkke | 38 | 93428 | 1500 |
| 541468 | n/a | Exon 1/Intron 1 | TCGCCCATCACTCTTC | eekddddddddddkke | 43 | 93989 | 1501 |
| 541469 | n/a | Exon 1/Intron 1 | CCTGTCGCCCATCACT | eekddddddddddkke | 61 | 93993 | 1502 |
| 541470 | n/a | Exon 1/Intron 1 | TCACCTGTCGCCCATC | eekddddddddddkke | 70 | 93996 | 1503 |
| 541471 | n/a | Exon 1/Intron 1 | CCATCACCTGTCGCCC | eekddddddddddkke | 89 | 93999 | 1504 |
| 541472 | n/a | Exon 1/Intron 1 | TCACCATCACCTGTCG | eekddddddddddkke | 72 | 94002 | 1505 |
| 541473 | n/a | Exon 1/Intron 1 | TAATAGTTGTCACCAT | eekddddddddddkke | 42 | 94011 | 1506 |
| 541474 | n/a | Exon 1/Intron 1 | TTCAGATCTTATTAAT | eekddddddddddkke | 0 | 94023 | 1507 |
| 541475 | n/a | Exon 1/Intron 1 | TTGCAAATTCAGTCTG | eekddddddddddkke | 32 | 94096 | 1508 |
| 541477 | n/a | Exon 2/Intron 2 | CGTTCTCTTGGAAGTA | eekddddddddddkke | 78 | 198766 | 1509 |
| 541478 | n/a | Exon 2/Intron 2 | TCTTGAATAAATTTCG | eekddddddddddkke | 25 | 198780 | 1510 |
| 541479 | n/a | Exon 2/Intron 2 | AAGCTCACTCTTCAAT | eekddddddddddkke | 60 | 198810 | 1511 |
| 541480 | n/a | Exon 2/Intron 2 | TCCAAGCTCACTCTTC | eekddddddddddkke | 49 | 198813 | 152 |
| 541481 | n/a | Exon 2/Intron 2 | GCTCCTGCCACTCTGT | eekddddddddddkke | 75 | 198837 | 1513 |
| 541482 | n/a | Exon 2/Intron 2 | ATGGGCAAAGGCATCT | eekddddddddddkke | 60 | 198874 | 1514 |
| 541483 | n/a | 5′ UTR | AGTCTTCCCGGCGAGG | eekddddddddddkke | 32 | 2571 | 1515 |
| 541484 | n/a | 5′ and | CCGCCGCTCCCTAGCC | eekddddddddddkke | 73 | 2867 | 1516 |
| | | overlappig | | | | | |
| | | with exon 1 | | | | | |
| 541485 | n/a | Intron 1 | GCCCGCAACTCCCTGC | eekddddddddddkke | 37 | 3341 | 1517 |
| 541486 | n/a | Intron 1 | CGCCTCCCCAGGCGCA | eekddddddddddkke | 34 | 4024 | 1518 |
| 541487 | n/a | Intron 1 | GAGTGTCTTCCCAGGC | eekddddddddddkke | 86 | 4446 | 1519 |
| 541488 | n/a | Intron 1 | CTGAAGACTCCTTGAA | eekddddddddddkke | 39 | 4721 | 1520 |
| 541489 | n/a | Intron 1 | GGCTAGCCAAGTTGGA | eekddddddddddkke | 54 | 5392 | 1521 |
| 541490 | n/a | Intron 1 | TGACTCCAGTCTTACC | eekddddddddddkke | 76 | 5802 | 1522 |
| 541491 | n/a | Intron 1 | ATTCATTGTGGTCAGC | eekddddddddddkke | 91 | 6128 | 1523 |
| 541492 | n/a | Intron 1 | GAAGTGGGTTTTTCCC | eekddddddddddkke | 86 | 6543 | 1524 |
| 541493 | n/a | Intron 1 | GCCTTGGTTCAGGTGA | eekddddddddddkke | 79 | 6786 | 1525 |

TABLE 54
Inhibition of GHR mRNA by deoxy, MOE and cEt
gapmers targeting SEQ ID NO: 3 and 4

| | | Target | | | | |
|---|---|---|---|---|---|---|
| | Target | SEQ | | | % | SEQ |
| ISIS | Start | ID | | | inhi- | ID |
| NO | Site | NO | Sequence | Chemistry | bition | NO |
| 541428 | 66 | 3 | CCACTGTA | eekdddddd | 92 | 1526 |
| | | | GCAGCCGC | ddddkke | | |
| 541476 | 263 | 4 | TAGGTATT | eekdddddd | 80 | 1527 |
| | | | TCAGAGCC | ddddkke | | |

TABLE 55
Inhibition of GHR mRNA by deoxy, MOE and cEt gapmers
targeting intronic regions of SEQ ID NO: 2

| | SEQ | SEQ | | | | | |
|---|---|---|---|---|---|---|---|
| | ID | ID | | | | | |
| | NO: 1 | NO: 2 | | | | % | SEQ |
| ISIS | Start | Start | | | | inhi- | ID |
| NO | Site | Site | Region | Sequence | Chemistry | bition | NO |
| 541262 | 156891 | 541277 | Intron 2 | TTGGTTTGTCAATCCT | eekddddddddddkke | 80 | 1370 |
| 541494 | 7231 | 541509 | Intron 1 | GTCCAGGCAGAGTTGT | eekddddddddddkke | 30 | 1528 |
| 541495 | 7570 | 541510 | Intron 1 | AGCCAAATGTTGGTCA | eekddddddddddkke | 19 | 1529 |
| 541496 | 8395 | 541511 | Intron 1 | GAGGGCGAGTTTTTCC | eekddddddddddkke | 71 | 1530 |
| 541497 | 9153 | 541512 | Intron 1 | GTGGCATTGGCAAGCC | eekddddddddddkke | 81 | 1531 |
| 541498 | 9554 | 541513 | Intron 1 | ACCCCACTGCACCAAG | eekddddddddddkke | 67 | 1532 |
| 541499 | 9931 | 541514 | Intron 1 | TCCAAGTACTTGCCAA | eekddddddddddkke | 83 | 1533 |
| 541500 | 10549 | 541515 | Intron 1 | AGTGCCTGGCCTAAGG | eekddddddddddkke | 75 | 1534 |
| 541501 | 11020 | 541516 | Intron 1 | GCGCTTCTTCCCTAGG | eekddddddddddkke | 71 | 1535 |
| 541502 | 11793 | 541517 | Intron 1 | CATCTTGCCCAGGGAT | eekddddddddddkke | 84 | 1536 |
| 541503 | 12214 | 541518 | Intron 1 | CCATCTTGCTCCAAGT | eekddddddddddkke | 93 | 1537 |
| 541504 | 12474 | 541519 | Intron 1 | CTTACATCCTGTAGGC | eekddddddddddkke | 71 | 1538 |
| 541505 | 12905 | 541520 | Intron 1 | CGCCTCCTGGTCCTCA | eekddddddddddkke | 97 | 1539 |
| 541506 | 13400 | 541521 | Intron 1 | CCCTATGCACTACCTA | eekddddddddddkke | 49 | 1540 |
| 541507 | 13717 | 541522 | Intron 1 | GAGGGACTGTGGTGCT | eekddddddddddkke | 65 | 1541 |
| 541508 | 14149 | 541523 | Intron 1 | GCCCAATATGTGCCAG | eekddddddddddkke | 60 | 1542 |
| 541509 | 14540 | 541524 | Intron 1 | GCTCTCTCATCGCTGG | eekddddddddddkke | 90 | 1543 |
| 541510 | 15264 | 541525 | Intron 1 | CTCAAGGCTATGTGCC | eekddddddddddkke | 67 | 1544 |
| 541511 | 15849 | 541526 | Intron 1 | TCCACATCCCTCATGT | eekddddddddddkke | 68 | 1545 |
| 541512 | 16530 | 541527 | Intron 1 | AGGACTGAAGGCCCAT | eekddddddddddkke | 49 | 1546 |
| 541513 | 17377 | 541528 | Intron 1 | GTGCGACTTACCAGCT | eekddddddddddkke | 85 | 1547 |
| 541514 | 17581 | 541529 | Intron 1 | TCGCTAAAGCCACACA | eekddddddddddkke | 89 | 1548 |
| 541515 | 17943 | 541530 | Intron 1 | GCTCTGGCTGATGGTC | eekddddddddddkke | 92 | 1549 |
| 541516 | 18353 | 541531 | Intron 1 | TTCCCATGAGGATTTC | eekddddddddddkke | 70 | 1550 |
| 541517 | 18636 | 541532 | Intron 1 | TTGGGCTTAAGCACTA | eekddddddddddkke | 71 | 1551 |
| 541518 | 19256 | 541533 | Intron 1 | GCTAGCACCTAGTCCA | eekddddddddddkke | 71 | 1552 |
| 541519 | 19814 | 541534 | Intron 1 | CCTCTGGCCTACAACA | eekddddddddddkke | 64 | 1553 |
| 541520 | 20365 | 541535 | Intron 1 | ACCCCTCATCAGCACC | eekddddddddddkke | 93 | 1554 |
| 541521 | 20979 | 541536 | Intron 1 | GGCCACCCCTGATCCT | eekddddddddddkke | 66 | 1555 |
| 541522 | 21566 | 541537 | Intron 1 | GAAGCTCCCTTGCCCA | eekddddddddddkke | 96 | 1556 |
| 541523 | 22150 | 541538 | Intron 1 | AGTGTTGCCCCTCCAA | eekddddddddddkke | 83 | 1557 |
| 541524 | 22803 | 541539 | Intron 1 | GGGTCTCCAACCTACT | eekddddddddddkke | 70 | 1558 |
| 541525 | 29049 | 541540 | Intron 1 | GGGATGTAGGTTTACC | eekddddddddddkke | 74 | 1559 |
| 541526 | 29554 | 541541 | Intron 1 | GCAACCGATATCACAG | eekddddddddddkke | 60 | 1560 |
| 541527 | 30245 | 541542 | Intron 1 | TGCCCTGGAACAAATT | eekddddddddddkke | 13 | 1561 |
| 541528 | 30550 | 541543 | Intron 1 | AGTCTAGGAGTAGCTA | eekddddddddddkke | 50 | 1562 |
| 541529 | 30915 | 541544 | Intron 1 | GCTGTTGTCAAGAGAC | eekddddddddddkke | 55 | 1563 |
| 541530 | 31468 | 541545 | Intron 1 | CACCTAGACACTCAGT | eekddddddddddkke | 47 | 1564 |
| 541531 | 32366 | 541546 | Intron 1 | GTCAAGGGATCCCTGC | eekddddddddddkke | 34 | 1565 |
| 541532 | 32897 | 541547 | Intron 1 | TCCCCCTGGCACTCCA | eekddddddddddkke | 79 | 1566 |
| 541533 | 33187 | 541548 | Intron 1 | GCCTGGTAACTCCATT | eekddddddddddkke | 56 | 1567 |
| 541534 | 33780 | 541549 | Intron 1 | GGGCTCACCAACTGTG | eekddddddddddkke | 39 | 1568 |
| 541535 | 34407 | 541550 | Intron 1 | CCACAGGATCATATCA | eekddddddddddkke | 37 | 1569 |
| 541536 | 34846 | 541551 | Intron 1 | CTCCAGCAGAAGTGTC | eekddddddddddkke | 10 | 1570 |
| 541537 | 35669 | 541552 | Intron 1 | AGCCCAACTGTTGCCT | eekddddddddddkke | 79 | 1571 |
| 541538 | 36312 | 541553 | Intron 1 | TGCCAGGCAGTTGCCA | eekddddddddddkke | 75 | 1572 |
| 541539 | 36812 | 541554 | Intron 1 | GCCAGTAAGCACCTTG | eekddddddddddkke | 93 | 1573 |
| 541540 | 37504 | 541555 | Intron 1 | CTAGCTTCCCAGCCCC | eekddddddddddkke | 46 | 1574 |
| 541541 | 38841 | 541556 | Intron 1 | TCAAGCCCAGCTAGCA | eekddddddddddkke | 39 | 1575 |
| 541542 | 39108 | 541557 | Intron 1 | CCTCACAGGCCCTAAT | eekddddddddddkke | 4 | 1576 |
| 541543 | 39408 | 541558 | Intron 1 | ACCTGCTTACATGGTA | eekddddddddddkke | 21 | 1577 |
| 541544 | 40250 | 541559 | Intron 1 | CCTTTGCTAGGACCCA | eekddddddddddkke | 52 | 1578 |
| 541545 | 40706 | 541560 | Intron 1 | GGGACTGCCACCAAGG | eekddddddddddkke | 27 | 1579 |
| 541546 | 40922 | 541561 | Intron 1 | GCTAGATGTTCAGGCC | eekddddddddddkke | 34 | 1580 |
| 541547 | 41424 | 541562 | Intron 1 | CCTATGGCCATGCTGA | eekddddddddddkke | 32 | 1581 |
| 541548 | 41999 | 541563 | Intron 1 | GTATGCTAGTTCCCAT | eekddddddddddkke | 83 | 1582 |
| 541549 | 42481 | 541564 | Intron 1 | CCCTCATAATCTTGGG | eekddddddddddkke | 13 | 1583 |
| 541550 | 42700 | 541565 | Intron 1 | GTCCAACCACTACCAC | eekddddddddddkke | 74 | 1584 |
| 541551 | 43291 | 541566 | Intron 1 | ACTTGCAGATAGCTGA | eekddddddddddkke | 73 | 1585 |
| 541552 | 43500 | 541567 | Intron 1 | GCATGACCCCACTGCC | eekddddddddddkke | 72 | 1586 |
| 541553 | 43947 | 541568 | Intron 1 | GAGGGTCACATTCCCT | eekddddddddddkke | 23 | 1587 |
| 541554 | 44448 | 541569 | Intron 1 | TCTCTTACTGGTGGGT | eekddddddddddkke | 90 | 1588 |
| 541555 | 45162 | 541570 | Intron 1 | GCCCCCTTCCTGGATA | eekddddddddddkke | 28 | 1589 |
| 541556 | 46010 | 541571 | Intron 1 | CCTCATGCGACACCAC | eekddddddddddkke | 71 | 1590 |
| 541557 | 46476 | 541572 | Intron 1 | AGCCCTCTGCCTGTAA | eekddddddddddkke | 67 | 1591 |
| 541558 | 47447 | 541573 | Intron 1 | CTCCCAGCTATAGGCG | eekddddddddddkke | 38 | 1592 |
| 541559 | 47752 | 541574 | Intron 1 | GCTAGCTGCGCAAGGA | eekddddddddddkke | 5 | 1593 |
| 541560 | 48001 | 541575 | Intron 1 | GCGCAGCCCGCTGCAA | eekddddddddddkke | 18 | 1594 |
| 541561 | 48423 | 541576 | Intron 1 | TGCATGATCCACCCCA | eekddddddddddkke | 65 | 1595 |
| 541562 | 50195 | 541577 | Intron 1 | GCTTAGTGCTGGCCCA | eekddddddddddkke | 72 | 1596 |
| 541563 | 50470 | 541578 | Intron 1 | CCTTCCAGTCCTCATA | eekddddddddddkke | 81 | 1597 |
| 541564 | 51104 | 541579 | Intron 1 | ATAGTGTCAAGGCCCA | eekddddddddddkke | 91 | 1598 |
| 541565 | 51756 | 541580 | Intron 1 | AGGCCTTAGTCACCCA | eekddddddddddkke | 88 | 1599 |
| 541566 | 52015 | 541581 | Intron 1 | TAACCAACCTAAGGGA | eekddddddddddkke | 11 | 1600 |
| 541567 | 52230 | 541582 | Intron 1 | ATTCTGGTGATGCCCT | eekddddddddddkke | 66 | 1601 |
| 541568 | 52588 | 541583 | Intron 1 | GTGTTCACTGCCATGA | eekddddddddddkke | 67 | 1602 |
| 541569 | 53532 | 541584 | Intron 1 | GGTAGAGCACACTGCC | eekddddddddddkke | 47 | 1603 |
| 541570 | 54645 | 541585 | Intron 1 | CCACTTTAATGCCACC | eekddddddddddkke | 76 | 1604 |

TABLE 56
Inhibition of GHR mRNA by deoxy, MOE and cEt gapmers targeting
intronic regions of SEQ ID NO: 2

| | | SEQ | | | | | |
|---|---|---|---|---|---|---|---|
| | SEQ | ID | | | | | |
| | ID | NO: 2 | Target | | | % | SEQ |
| ISIS | NO: 2 | Stop | Region | | | inhi- | ID |
| NO | Start | Site | Site | Sequence | Chemistry | bition | NO |
| 541262 | 156891 | 156906 | Intron 2 | TTGGTTTGTCAATCCT | eekddddddddddkke | 88 | 1370 |
| 541571 | 54886 | 54901 | Intron 1 | GTCAAATGCTGTTGGG | eekddddddddddkke | 91 | 1605 |
| 541572 | 55900 | 55915 | Intron 1 | CATCCCCTATCAGGGT | eekddddddddddkke | 53 | 1606 |
| 541573 | 62266 | 62281 | Intron 1 | CTCGAATCCCTTGAGC | eekddddddddddkke | 73 | 1607 |
| 541574 | 62733 | 62748 | Intron 1 | GATTCCCTCCCCTAAC | eekddddddddddkke | 27 | 1608 |
| 541575 | 63173 | 63188 | Intron 1 | ATCCATCCATGTGCTG | eekddddddddddkke | 92 | 1609 |
| 541576 | 63751 | 63766 | Intron 1 | GAGCATGCCTCAGTGG | eekddddddddddkke | 81 | 1610 |
| 541577 | 63964 | 63979 | Intron 1 | CAGAAGGACTGCCTCT | eekddddddddddkke | 50 | 1611 |
| 541578 | 64213 | 64228 | Intron 1 | ACAATGCTCAACAGCC | eekddddddddddkke | 75 | 1612 |
| 541579 | 64576 | 64591 | Intron 1 | GTTGGATCTGGCATGC | eekddddddddddkke | 80 | 1613 |
| 541580 | 65027 | 65042 | Intron 1 | CGGCTGAGAGCAAGGG | eekddddddddddkke | 88 | 1614 |
| 541581 | 65363 | 65378 | Intron 1 | GAGAGGGTTCAGCCTG | eekddddddddddkke | 62 | 1615 |
| 541582 | 65600 | 65615 | Intron 1 | ACTTAGTTCCTAGCCA | eekddddddddddkke | 91 | 1616 |
| 541583 | 66087 | 66102 | Intron 1 | GTGAACCAGATGTGCT | eekddddddddddkke | 86 | 1617 |
| 541584 | 66566 | 66581 | Intron 1 | GGAGTGACAGCTAAGT | eekddddddddddkke | 98 | 1618 |
| 541585 | 66978 | 66993 | Intron 1 | AAGTGTTCAGAGCCAC | eekddddddddddkke | 97 | 1619 |
| 541586 | 67662 | 67677 | Intron 1 | AACCCTGCCAAGGTAC | eekddddddddddkke | 45 | 1620 |
| 541587 | 67914 | 67929 | Intron 1 | GATGGTGAGCACTACC | eekddddddddddkke | 78 | 1621 |
| 541588 | 68278 | 68293 | Intron 1 | GGCAGGATAGGACAGA | eekddddddddddkke | 11 | 1622 |
| 541589 | 68727 | 68742 | Intron 1 | GCAAAGTGATGAGCCT | eekddddddddddkke | 81 | 1623 |
| 541590 | 69207 | 69222 | Intron 1 | CTATCCACACCATTCC | eekddddddddddkke | 93 | 1624 |
| 541591 | 69605 | 69620 | Intron 1 | GGATCATGGGCCCCTA | eekddddddddddkke | 70 | 1625 |
| 541592 | 70130 | 70145 | Intron 1 | GTGAATTTGCTGGGCC | eekddddddddddkke | 94 | 1626 |
| 541593 | 70569 | 70584 | Intron 1 | GTGATGGGCCCAAGGC | eekddddddddddkke | 67 | 1627 |
| 541594 | 71056 | 71071 | Intron 1 | TCCTCAGTCGGCTTGC | eekddddddddddkke | 69 | 1628 |
| 541595 | 71314 | 71329 | Intron 1 | CAGCCTTTTGCCAGAT | eekddddddddddkke | 93 | 1629 |
| 541596 | 71620 | 71635 | Intron 1 | CCTCCCTAGGATTACC | eekddddddddddkke | 42 | 1630 |
| 541597 | 72226 | 72241 | Intron 1 | ACGCCCCAATCACTCA | eekddddddddddkke | 79 | 1631 |
| 541598 | 72655 | 72670 | Intron 1 | GCATGACCCATTATGT | eekddddddddddkke | 94 | 1632 |
| 541599 | 73061 | 73076 | Intron 1 | TCCCTCCAAGAGCTCA | eekddddddddddkke | 83 | 1633 |
| 541600 | 73708 | 73723 | Intron 1 | GATGCCTGTGGCTGAC | eekddddddddddkke | 84 | 1634 |
| 541601 | 74107 | 74122 | Intron 1 | GGCTAGCATGTTGCCT | eekddddddddddkke | 19 | 1635 |
| 541602 | 74542 | 74557 | Intron 1 | TAACCCACTAGGCTGG | eekddddddddddkke | 84 | 1636 |
| 541603 | 74947 | 74962 | Intron 1 | TGGCCCAAAACTAATC | eekddddddddddkke | 34 | 1637 |
| 541604 | 75192 | 75207 | Intron 1 | GGAGCAGTCTGGCACC | eekddddddddddkke | 85 | 1638 |
| 541605 | 75699 | 75714 | Intron 1 | TATTCTGTGGGACAAG | eekddddddddddkke | 51 | 1639 |
| 541606 | 75979 | 75994 | Intron 1 | GTGTCTAGTTCCAGCC | eekddddddddddkke | 86 | 1640 |
| 541607 | 76410 | 76425 | Intron 1 | TACTATCATGTAGCGC | eekddddddddddkke | 87 | 1641 |
| 541608 | 76701 | 76716 | Intron 1 | TGCCCTTGTAGTGAGA | eekddddddddddkke | 31 | 1642 |
| 541609 | 76980 | 76995 | Intron 1 | TCCCCAACCTACAAGC | eekddddddddddkke | 41 | 1643 |
| 541610 | 77292 | 77307 | Intron 1 | GCTCTAGGCATATGAA | eekddddddddddkke | 63 | 1644 |
| 541611 | 77555 | 77570 | Intron 1 | TACCTCCCTTGTAGGG | eekddddddddddkke | 27 | 1645 |
| 541612 | 77854 | 77869 | Intron 1 | GGTTCCCTTGCAGAGA | eekddddddddddkke | 62 | 1646 |
| 541613 | 78311 | 78326 | Intron 1 | GTGCCCTCTTCATGCC | eekddddddddddkke | 68 | 1647 |
| 541614 | 79006 | 79021 | Intron 1 | CCTGTGTGCAACTGGC | eekddddddddddkke | 85 | 1648 |
| 541615 | 79490 | 79505 | Intron 1 | CTGAGTCATTTGCCTG | eekddddddddddkke | 93 | 1649 |
| 541616 | 79829 | 79844 | Intron 1 | GGCCTTAGTAGGCCAG | eekddddddddddkke | 0 | 1650 |
| 541617 | 80277 | 80292 | Intron 1 | GTCCTTGCAGTCAACC | eekddddddddddkke | 77 | 1651 |
| 541618 | 80575 | 80590 | Intron 1 | GCTGGGCCAAGTCCAT | eekddddddddddkke | 77 | 1652 |
| 541619 | 80895 | 80910 | Intron 1 | TAGGGCACTTTTTGCC | eekddddddddddkke | 31 | 1653 |
| 541620 | 81207 | 81222 | Intron 1 | GCTGAGGTCCCTCTCT | eekddddddddddkke | 34 | 1654 |
| 541621 | 81761 | 81776 | Intron 1 | CTTTGGTCCCATTGCC | eekddddddddddkke | 83 | 1655 |
| 541622 | 82233 | 82248 | Intron 1 | GGAACATGCCAAGGGC | eekddddddddddkke | 91 | 1656 |
| 541623 | 82738 | 82753 | Intron 1 | AGGTGGTCTCCCTTCA | eekddddddddddkke | 74 | 1657 |
| 541624 | 83056 | 83071 | Intron 1 | TCCCAAAGCTCCCCTC | eekddddddddddkke | 53 | 1658 |
| 541625 | 83401 | 83416 | Intron 1 | CCTGGCCTAGCAAGCT | eekddddddddddkke | 47 | 1659 |
| 541626 | 84048 | 84063 | Intron 1 | TCTTAGCCCTGGGCTA | eekddddddddddkke | 12 | 1660 |
| 541627 | 84388 | 84403 | Intron 1 | GACTTGGACTGGGCTC | eekddddddddddkke | 81 | 1661 |
| 541628 | 85261 | 85276 | Intron 1 | GGCCTAGGATCTAGGA | eekddddddddddkke | 0 | 1662 |
| 541629 | 85714 | 85729 | Intron 1 | GTCAGGCTAGAGGGAC | eekddddddddddkke | 41 | 1663 |
| 541630 | 86220 | 86235 | Intron 1 | GGAAGTTCTCCCAGCC | eekddddddddddkke | 47 | 1664 |
| 541631 | 86640 | 86655 | Intron 1 | CCTGACTGATGTACAC | eekddddddddddkke | 35 | 1665 |
| 541632 | 86903 | 86918 | Intron 1 | CTCTGGCCTAGCCTAT | eekddddddddddkke | 54 | 1666 |
| 541633 | 87247 | 87262 | Intron 1 | GGCTGCTGTCAGATGC | eekddddddddddkke | 79 | 1667 |
| 541634 | 88293 | 88308 | Intron 1 | TCTCAGGTGTAGGCAG | eekddddddddddkke | 59 | 1668 |
| 541635 | 88605 | 88620 | Intron 1 | GGTCACTGAGACTGGG | eekddddddddddkke | 88 | 1669 |
| 541636 | 88952 | 88967 | Intron 1 | ACCCACTAGCAGCTAG | eekddddddddddkke | 61 | 1670 |
| 541637 | 89160 | 89175 | Intron 1 | CGGATGAGGCAGTTAG | eekddddddddddkke | 42 | 1671 |
| 541638 | 89855 | 89870 | Intron 1 | TGGTAGGCCCTCTGGC | eekddddddddddkke | 28 | 1672 |
| 541639 | 90240 | 90255 | Intron 1 | GTCACAAGGTGGGTGC | eekddddddddddkke | 28 | 1673 |
| 541640 | 90513 | 90528 | Intron 1 | GTCTTGCCCTCACGGA | eekddddddddddkke | 73 | 1674 |
| 541641 | 91073 | 91088 | Intron 1 | GCAGTCTGTGGACTTA | eekddddddddddkke | 93 | 1675 |
| 541642 | 91647 | 91662 | Intron 1 | TGCTCTCTGGTCACAC | eekddddddddddkke | 75 | 1676 |
| 541643 | 92069 | 92084 | Intron 1 | TATCCCCCAGAGCCAT | eekddddddddddkke | 68 | 1677 |
| 541644 | 92356 | 92371 | Intron 1 | AAGGTGAGAGGGCACT | eekddddddddddkke | 75 | 1678 |
| 541645 | 92904 | 92919 | Intron 1 | GTTTTAACCTCACCCT | eekddddddddddkke | 0 | 1679 |
| 541646 | 93846 | 93861 | Intron 1 | CCTTCCACTGACCTTC | eekddddddddddkke | 56 | 1680 |
| 541647 | 94374 | 94389 | Intron 1 | GACACTAGCCTAAGCC | eekddddddddddkke | 37 | 1681 |

TABLE 57
Inhibition of GHR mRNA by deoxy, MOE and cEt gapmers targeting intronic regions of
SEQ ID NO: 2

| | SEQ ID | SEQ ID | | | | | |
|---|---|---|---|---|---|---|---|
| | NO: 2 | NO: 2 | | | | | |
| ISIS | Start | Stop | Target | | | % | SEQ |
| NO | Site | Site | Region | Sequence | Chemistry | inhibition | ID NO |
| 541262 | 156891 | 156906 | Intron 2 | TTGGTTTGTCAATCCT | eekddddddddddkke | 94 | 1370 |
| 541648 | 94638 | 94653 | Intron 1 | GGTTAGCCCTCAGCCT | eekddddddddddkke | 61 | 1682 |
| 541649 | 94839 | 94854 | Intron 1 | TATGAAGGTTGGACCA | eekddddddddddkke | 69 | 1683 |
| 541650 | 95509 | 95524 | Intron 1 | CAACCAGCTCACCTGA | eekddddddddddkke | 37 | 1684 |
| 541651 | 95829 | 95844 | Intron 1 | GGGCTCCAAGGCTCTC | eekddddddddddkke | 75 | 1685 |
| 541652 | 96158 | 96173 | Intron 1 | AGCTGTTACATGCCAA | eekddddddddddkke | 93 | 1686 |
| 541653 | 96488 | 96503 | Intron 1 | GGCCCAGAGGTTATAG | eekddddddddddkke | 30 | 1687 |
| 541654 | 96991 | 97006 | Intron 1 | GTCCTTAGACCCCTCA | eekddddddddddkke | 70 | 1688 |
| 541655 | 97539 | 97554 | Intron 1 | GCCCTGGCTAGAGACA | eekddddddddddkke | 39 | 1689 |
| 541656 | 98132 | 98147 | Intron 1 | CATCCAGCAGCTGGAC | eekddddddddddkke | 35 | 1690 |
| 541657 | 98833 | 98848 | Intron 1 | GACTGAGGTCATCACA | eekddddddddddkke | 60 | 1691 |
| 541658 | 99258 | 99273 | Intron 1 | GGCCAGGCACATCATG | eekddddddddddkke | 45 | 1692 |
| 541659 | 99843 | 99858 | Intron 1 | GGAGCTCATTGAGCCA | eekddddddddddkke | 36 | 1693 |
| 541660 | 100406 | 100421 | Intron 1 | GTGCCCATTGCTGTGT | eekddddddddddkke | 70 | 1694 |
| 541661 | 100742 | 100757 | Intron 1 | CCAAGTGTGGCTTCAG | eekddddddddddkke | 54 | 1695 |
| 541662 | 101305 | 101320 | Intron 1 | CCACCCTTTATACGCA | eekddddddddddkke | 87 | 1696 |
| 541663 | 101788 | 101803 | Intron 1 | CAGTAACCCCAAGGGA | eekddddddddddkke | 12 | 1697 |
| 541664 | 102649 | 102664 | Intron 1 | CCCCACCTTATATGGG | eekddddddddddkke | 9 | 1698 |
| 541665 | 103034 | 103049 | Intron 1 | AGGCCCTTTTTACATG | eekddddddddddkke | 9 | 1699 |
| 541666 | 103316 | 103331 | Intron 1 | TCAATAAGTCCCTAGG | eekddddddddddkke | 20 | 1700 |
| 541667 | 104277 | 104292 | Intron 1 | GGCATTGAGTGACTGC | eekddddddddddkke | 51 | 1701 |
| 541668 | 104679 | 104694 | Intron 1 | ATAATGCCTTCTCAGC | eekddddddddddkke | 62 | 1702 |
| 541669 | 106349 | 106364 | Intron 1 | GTGAGGCATTTAGCCC | eekddddddddddkke | 35 | 1703 |
| 541670 | 106632 | 106647 | Intron 1 | GCTCTTGTGTTGGGTA | eekddddddddddkke | 89 | 1704 |
| 541671 | 107084 | 107099 | Intron 1 | TGTGCAGGAGGTCTCA | eekddddddddddkke | 60 | 1705 |
| 541672 | 107949 | 107964 | Intron 1 | TGGAGAGTCTTGTCTC | eekddddddddddkke | 17 | 1706 |
| 541673 | 108773 | 108788 | Intron 1 | GTGACCCACCCAAGAG | eekddddddddddkke | 34 | 1707 |
| 541674 | 109336 | 109351 | Intron 1 | GTTGTAGCTAGTGTTC | eekddddddddddkke | 74 | 1708 |
| 541675 | 109849 | 109864 | Intron 1 | GCCTTAGTTTGTGCCA | eekddddddddddkke | 78 | 1709 |
| 541676 | 110427 | 110442 | Intron 1 | GCCCCAGCTGAGAATT | eekddddddddddkke | 29 | 1710 |
| 541677 | 110701 | 110716 | Intron 1 | ACAACAATCCAGGGTG | eekddddddddddkke | 61 | 1711 |
| 541678 | 110959 | 110974 | Intron 1 | CTCCCCTGGAAGTCAC | eekddddddddddkke | 59 | 1712 |
| 541679 | 111307 | 111322 | Intron 1 | GCCCTCATGGCTCAAG | eekddddddddddkke | 60 | 1713 |
| 541680 | 112499 | 112514 | Intron 1 | TCAGCAGATAGGGAGC | eekddddddddddkke | 61 | 1714 |
| 541681 | 113896 | 113911 | Intron 1 | GAATGCGGTGATCAGG | eekddddddddddkke | 29 | 1715 |
| 541682 | 117477 | 117492 | Intron 1 | CTGAGAGAATTGGCCC | eekddddddddddkke | 5 | 1716 |
| 541683 | 117740 | 117755 | Intron 1 | AGGCACATTGTTACCA | eekddddddddddkke | 26 | 1717 |
| 541684 | 118229 | 118244 | Intron 1 | GGGAGGCACTAGAGAA | eekddddddddddkke | 13 | 1718 |
| 541685 | 119269 | 119284 | Intron 1 | TACAGTAACACATCCC | eekddddddddddkke | 78 | 1719 |
| 541686 | 119688 | 119703 | Intron 1 | GAAGCTCAGCCTGATC | eekddddddddddkke | 45 | 1720 |
| 541687 | 120376 | 120391 | Intron 1 | CTTGCCTGACAACCTA | eekddddddddddkke | 53 | 1721 |
| 541688 | 120738 | 120753 | Intron 1 | GCCTACCTGCTTTTGC | eekddddddddddkke | 10 | 1722 |
| 541689 | 121242 | 121257 | Intron 1 | TTTCCCAACCACTTAG | eekddddddddddkke | 7 | 1723 |
| 541690 | 121615 | 121630 | Intron 1 | TCTCCTATTTCAGTTA | eekddddddddddkke | 23 | 1724 |
| 541691 | 121823 | 121838 | Intron 1 | GGGTGATGGATGAACT | eekddddddddddkke | 40 | 1725 |
| 541692 | 122345 | 122360 | Intron 1 | ACACTGCTGGTAGTGA | eekddddddddddkke | 0 | 1726 |
| 541693 | 122588 | 122603 | Intron 1 | ACCCAACTAGCCTGTC | eekddddddddddkke | 35 | 1727 |
| 541694 | 123152 | 123167 | Intron 1 | GAGACCTGCTGCCTGA | eekddddddddddkke | 80 | 1728 |
| 541695 | 123671 | 123686 | Intron 1 | ACATCTCTTGGGAGGT | eekddddddddddkke | 78 | 1729 |
| 541696 | 124040 | 124055 | Intron 1 | ACATAGTACCCCTCCA | eekddddddddddkke | 35 | 1730 |
| 541697 | 124430 | 124445 | Intron 1 | CTCTCAAGTACCTGCC | eekddddddddddkke | 72 | 1731 |
| 541698 | 124824 | 124839 | Intron 1 | TTTGTACCCAACCCCC | eekddddddddddkke | 15 | 1732 |
| 541699 | 125032 | 125047 | Intron 1 | AGGCCCACATAAATGC | eekddddddddddkke | 21 | 1733 |
| 541700 | 125533 | 125548 | Intron 1 | GAGCATCCCCTACACT | eekddddddddddkke | 12 | 1734 |
| 541701 | 126357 | 126372 | Intron 1 | GCTGGGCCTTTAGCTG | eekddddddddddkke | 66 | 1735 |
| 541702 | 126736 | 126751 | Intron 1 | TTGGTCAATTGGGCAG | eekddddddddddkke | 79 | 1736 |
| 541703 | 127179 | 127194 | Intron 1 | GTCTCATGAGGCCTAT | eekddddddddddkke | 60 | 1737 |
| 541704 | 127454 | 127469 | Intron 1 | GGAGGTGGGATCCCAC | eekddddddddddkke | 35 | 1738 |
| 541705 | 128467 | 128482 | Intron 1 | GCCCACTACCTAGCAC | eekddddddddddkke | 30 | 1739 |
| 541706 | 129096 | 129111 | Intron 1 | CCCAGCTGGCTGGTCG | eekddddddddddkke | 50 | 1740 |
| 541707 | 129312 | 129327 | Intron 1 | GCACCAGGTCTCCTGT | eekddddddddddkke | 7 | 1741 |
| 541708 | 129516 | 129531 | Intron 1 | GTCTAGAAGCCTAGGG | eekddddddddddkke | 23 | 1742 |
| 541709 | 129976 | 129991 | Intron 1 | GCCGGGTGTTGGTGCA | eekddddddddddkke | 50 | 1743 |
| 541710 | 130308 | 130323 | Intron 1 | TTGGTGCCTGTGTTGC | eekddddddddddkke | 49 | 1744 |
| 541711 | 130767 | 130782 | Intron 1 | TGCTTCTGATCCCTAC | eekddddddddddkke | 18 | 1745 |
| 541712 | 131286 | 131301 | Intron 1 | GTTCCCAGGAGGCTTA | eekddddddddddkke | 56 | 1746 |
| 541713 | 131676 | 131691 | Intron 1 | AGGCCCCTAGAGTCTA | eekddddddddddkke | 41 | 1747 |
| 541714 | 132292 | 132307 | Intron 1 | TGGTGTGCCCAGACTT | eekddddddddddkke | 60 | 1748 |
| 541715 | 132730 | 132745 | Intron 1 | GATGGCTAACCCACTG | eekddddddddddkke | 14 | 1749 |
| 541716 | 133101 | 133116 | Intron 1 | CCCCCAAAAGTTGCCC | eekddddddddddkke | 12 | 1750 |
| 541717 | 133522 | 133537 | Intron 1 | TAGGGTGTTCCAGATC | eekddddddddddkke | 44 | 1751 |
| 541718 | 133724 | 133739 | Intron 1 | GTACCATGAAGCTCTG | eekddddddddddkke | 67 | 1752 |
| 541719 | 134086 | 134101 | Intron 1 | CTTGGACTTGGACCAT | eekddddddddddkke | 42 | 1753 |
| 541720 | 134441 | 134456 | Intron 1 | GTGCATAGGGCCTGTC | eekddddddddddkke | 42 | 1754 |
| 541721 | 135015 | 135030 | Intron 1 | CCTCACCTGAACACCC | eekddddddddddkke | 23 | 1755 |
| 541722 | 135859 | 135874 | Intron 1 | ATGCCTCCCCGCAACT | eekddddddddddkke | 27 | 1756 |
| 541723 | 136287 | 136302 | Intron 1 | TTGTGCTTGGGTGTAC | eekddddddddddkke | 39 | 1757 |
| 541724 | 137000 | 137015 | Intron 1 | AGGCTTCATGTGAGGT | eekddddddddddkke | 86 | 1758 |

TABLE 58
Inhibition of GHR mRNA by deoxy, MOEand cEt gapmers targeting introns 1
and 2 of SEQ ID NO: 2

| | SEQ ID | SEQ ID | | | | | |
|---|---|---|---|---|---|---|---|
| | NO: 2 | NO: 2 | | | | | |
| ISIS | Start | Stop | Target | | | % | SEQ |
| NO | Site | Site | Region | Sequence | Chemistry | inhibition | ID NO |
| 541262 | 156891 | 156906 | Intron 2 | TTGGTTTGTCAATCCT | eekddddddddddkke | 95 | 1370 |
| 541725 | 137372 | 137387 | Intron 1 | TGTAAAAGGTCCTCCC | eekddddddddddkke | 53 | 1759 |
| 541726 | 137750 | 137765 | Intron 1 | GACCTGTGCAGCAGGT | eekddddddddddkke | 32 | 1760 |
| 541727 | 138783 | 138798 | Intron 1 | TCCTCTTGGAGATCCA | eekddddddddddkke | 44 | 1761 |
| 541728 | 139825 | 139840 | Intron 1 | AGGTCATAGGACTGCT | eekddddddddddkke | 73 | 1762 |
| 541729 | 140343 | 140358 | Intron 1 | GAAGGTCAGACTAGGG | eekddddddddddkke | 53 | 1763 |
| 541730 | 140686 | 140701 | Intron 1 | TCTGTAGACTGCCCAG | eekddddddddddkke | 87 | 1764 |
| 541731 | 141116 | 141131 | Intron 1 | GTCCCTCTATTCCCCT | eekddddddddddkke | 57 | 1765 |
| 541732 | 141591 | 141606 | Intron 1 | AATTGCCATGCTCCCA | eekddddddddddkke | 56 | 1766 |
| 541733 | 142113 | 142128 | Intron 1 | GATGACCTTCCTCCAA | eekddddddddddkke | 15 | 1767 |
| 541734 | 142327 | 142342 | Intron 1 | GTTTCCAGTAGCACCT | eekddddddddddkke | 82 | 1768 |
| 541735 | 143118 | 143133 | Intron 1 | GGCCTTGAGCTGATGG | eekddddddddddkke | 11 | 1769 |
| 541736 | 143836 | 143851 | Intron 1 | TATCCCTAATCAGGCT | eekddddddddddkke | 40 | 1770 |
| 541737 | 144094 | 144109 | Intron 1 | GGTGTCCACATCCCGG | eekddddddddddkke | 58 | 1771 |
| 541738 | 144558 | 144573 | Intron 1 | AGCTGGACAGGCCATA | eekddddddddddkke | 27 | 1772 |
| 541740 | 145510 | 145525 | Intron 2 | GGTAATCACCCAGAGA | eekddddddddddkke | 90 | 1773 |
| 541741 | 145937 | 145952 | Intron 2 | GCGCTAAGTCTGCTGT | eekddddddddddkke | 92 | 1774 |
| 541742 | 146320 | 146335 | Intron 2 | CCTCAAATCTTGCCCA | eekddddddddddkke | 96 | 1775 |
| 541743 | 147028 | 147043 | Intron 2 | ATCCAGACCTGGCAGA | eekddddddddddkke | 84 | 1776 |
| 541744 | 147262 | 147277 | Intron 2 | ATCCCTGCTCAAGTGC | eekddddddddddkke | 89 | 1777 |
| 541745 | 147671 | 147686 | Intron 2 | CAGGCACTCCTTGGAA | eekddddddddddkke | 93 | 1778 |
| 541746 | 148139 | 148154 | Intron 2 | AGCTGAGGTATCCCTC | eekddddddddddkke | 94 | 1779 |
| 541747 | 148564 | 148579 | Intron 2 | GGGCCCAGCAAGTCTT | eekddddddddddkke | 33 | 1780 |
| 541748 | 149069 | 149084 | Intron 2 | GTTTTGTCAGTGTGCA | eekddddddddddkke | 98 | 1781 |
| 541749 | 149491 | 149506 | Intron 2 | GTGACCTGCTGAACTC | eekddddddddddkke | 95 | 1782 |
| 541750 | 150236 | 150251 | Intron 2 | GGCTGAACTGTGCACC | eekddddddddddkke | 95 | 1783 |
| 541751 | 150748 | 150763 | Intron 2 | GGGTGGTCCCACTCCT | eekddddddddddkke | 91 | 1784 |
| 541752 | 151124 | 151139 | Intron 2 | GAGGAATCCTGGGCCC | eekddddddddddkke | 94 | 1785 |
| 541753 | 151373 | 151388 | Intron 2 | ATGACAAGCTAGGTGC | eekddddddddddkke | 81 | 1786 |
| 541754 | 151644 | 151659 | Intron 2 | TTGCCAGACAGGGCAC | eekddddddddddkke | 18 | 1787 |
| 541755 | 152373 | 152388 | Intron 2 | AGACCCCTCCCACTAT | eekddddddddddkke | 43 | 1788 |
| 541756 | 152617 | 152632 | Intron 2 | GGTGCTGGGTGACCGG | eekddddddddddkke | 91 | 1789 |
| 541757 | 153349 | 153364 | Intron 2 | GGCCAAACGGTGCCCT | eekddddddddddkke | 23 | 1790 |
| 541758 | 153918 | 153933 | Intron 2 | TGGGTGAATAGCAACC | eekddddddddddkke | 85 | 1791 |
| 541759 | 154171 | 154186 | Intron 2 | GCCCCCAAGGAAGTGA | eekddddddddddkke | 76 | 1792 |
| 541760 | 154813 | 154828 | Intron 2 | CAGGCTTCATGTGTGG | eekddddddddddkke | 92 | 1793 |
| 541761 | 155289 | 155304 | Intron 2 | CTGTCAGTGCTTTGGT | eekddddddddddkke | 52 | 1794 |
| 541762 | 156233 | 156248 | Intron 2 | GAGTACCCTGGCAGGT | eekddddddddddkke | 58 | 1795 |
| 541763 | 156847 | 156862 | Intron 2 | TAGCTAGCACCTGGGT | eekddddddddddkke | 90 | 1796 |
| 541764 | 157552 | 157567 | Intron 2 | GGCAAACCTTTGAGCC | eekddddddddddkke | 27 | 1797 |
| 541765 | 157927 | 157942 | Intron 2 | GCTATCATTGGAGCAG | eekddddddddddkke | 94 | 1798 |
| 541766 | 158542 | 158557 | Intron 2 | CCTCTGAGTACTCCCT | eekddddddddddkke | 96 | 1799 |
| 541767 | 159252 | 159267 | Intron 2 | AGCTGAAGGCAACCAG | eekddddddddddkke | 97 | 1800 |
| 541768 | 159539 | 159554 | Intron 2 | GGGCAGTTTTCCATAG | eekddddddddddkke | 89 | 1801 |
| 541769 | 159778 | 159793 | Intron 2 | GGTCCTACCTCTGACA | eekddddddddddkke | 82 | 1802 |
| 541770 | 160352 | 160367 | Intron 2 | GGCTGCCTTAGGGTGG | eekddddddddddkke | 90 | 1803 |
| 541771 | 160812 | 160827 | Intron 2 | CGCACCTCCCCCACTA | eekddddddddddkke | 15 | 1804 |
| 541772 | 161461 | 161476 | Intron 2 | GCTTATTGGTCCATGG | eekddddddddddkke | 93 | 1805 |
| 541773 | 161821 | 161836 | Intron 2 | AACCGCAGAGCCCCCA | eekddddddddddkke | 76 | 1806 |
| 541774 | 162132 | 162147 | Intron 2 | GGGCTTGTTCTGCCAA | eekddddddddddkke | 33 | 1807 |
| 541775 | 162639 | 162654 | Intron 2 | GGGACCTGCGCTGACT | eekddddddddddkke | 86 | 1808 |
| 541776 | 163024 | 163039 | Intron 2 | CTTTCACCTGGTGACT | eekddddddddddkke | 83 | 1809 |
| 541777 | 163542 | 163557 | Intron 2 | AGCTTGAGGGAGTATA | eekddddddddddkke | 52 | 1810 |
| 541778 | 164144 | 164159 | Intron 2 | GCCTGCTCAATTGAGG | eekddddddddddkke | 32 | 1811 |
| 541779 | 164570 | 164585 | Intron 2 | ATAGCAGCTGGCTGCC | eekddddddddddkke | 24 | 1812 |
| 541780 | 165419 | 165434 | Intron 2 | AAAAGCTTGGCACCCC | eekddddddddddkke | 91 | 1813 |
| 541781 | 165859 | 165874 | Intron 2 | CCTGGCAAGAAGGGCC | eekddddddddddkke | 65 | 1814 |
| 541782 | 166435 | 166450 | Intron 2 | TTAGCCCATCTATCCC | eekddddddddddkke | 82 | 1815 |
| 541783 | 166837 | 166852 | Intron 2 | GTGGTCTCCCTGTGCC | eekddddddddddkke | 90 | 1816 |
| 541784 | 167107 | 167122 | Intron 2 | AGCCCTCTCTGGCAAA | eekddddddddddkke | 38 | 1817 |
| 541785 | 168004 | 168019 | Intron 2 | TTACTGTGGCCCGAGT | eekddddddddddkke | 94 | 1818 |
| 541786 | 169062 | 169077 | Intron 2 | GTAGACTCCTAGGGTC | eekddddddddddkke | 90 | 1819 |
| 541787 | 169696 | 169711 | Intron 2 | CCTCCAGTTAGTGTGC | eekddddddddddkke | 91 | 1820 |
| 541788 | 170081 | 170096 | Intron 2 | GTGGGTGGCCAACAGG | eekddddddddddkke | 91 | 1821 |
| 541789 | 170799 | 170814 | Intron 2 | GGGATTCCCTGGTAGC | eekddddddddddkke | 77 | 1822 |
| 541790 | 171021 | 171036 | Intron 2 | GTGAGACCGGCCTTTG | eekddddddddddkke | 23 | 1823 |
| 541791 | 171530 | 171545 | Intron 2 | ACTGGCACCCACTTGG | eekddddddddddkke | 54 | 1824 |
| 541792 | 172447 | 172462 | Intron 2 | ATTGGCCTAATGCCCC | eekddddddddddkke | 76 | 1825 |
| 541793 | 172733 | 172748 | Intron 2 | AGGCTATACATTCCAG | eekddddddddddkke | 94 | 1826 |
| 541794 | 173045 | 173060 | Intron 2 | GGTGGCAGCTAGGTGG | eekddddddddddkke | 80 | 1827 |
| 541795 | 173677 | 173692 | Intron 2 | TCCACAGTTGGCACTG | eekddddddddddkke | 77 | 1828 |
| 541796 | 174128 | 174143 | Intron 2 | TGGGCCTTAGATTGTA | eekddddddddddkke | 69 | 1829 |
| 541797 | 174521 | 174536 | Intron 2 | TGTCTTCCTGGTGGCC | eekddddddddddkke | 97 | 1830 |
| 541798 | 174870 | 174885 | Intron 2 | CCCGCCTCTCCAGCAA | eekddddddddddkke | 89 | 1831 |
| 541799 | 175275 | 175290 | Intron 2 | GCAGCAGCCAATAAGT | eekddddddddddkke | 76 | 1832 |
| 541800 | 175691 | 175706 | Intron 2 | TTGTATCCTGGCCCCT | eekddddddddddkke | 80 | 1833 |
| 541801 | 176038 | 176053 | Intron 2 | GCCTCATGGGCCTTAC | eekddddddddddkke | 66 | 1834 |

TABLE 59
Inhibition of GHR mRNA by deoxy, MOE and cEt gapmers targeting introns
2 and 3 of SEQ ID NO: 2

| | SEQ ID | SEQ ID | | | | | |
|---|---|---|---|---|---|---|---|
| | NO: 2 | NO: 2 | | | | | |
| ISIS | Start | Stop | Target | | | % | SEQ |
| NO | Site | Site | Region | Sequence | Chemistry | inhibition | ID NO |
| 541262 | 156891 | 156906 | Intron 2 | TTGGTTTGTCAATCCT | eekddddddddddkke | 97 | 1370 |
| 541802 | 176619 | 176634 | Intron 2 | GGATGCCAGTCTTGGC | eekddddddddddkke | 48 | 1835 |
| 541803 | 176835 | 176850 | Intron 2 | CTGCTCTCAGTACCTC | eekddddddddddkke | 87 | 1836 |
| 541804 | 177300 | 177315 | Intron 2 | ACCCAAGAAGTCACCT | eekddddddddddkke | 93 | 1837 |
| 541805 | 177551 | 177566 | Intron 2 | GCCTCAAGCCCTACCC | eekddddddddddkke | 73 | 1838 |
| 541806 | 178066 | 178081 | Intron 2 | AGCTCCAGCCTATAGA | eekddddddddddkke | 81 | 1839 |
| 541807 | 178361 | 178376 | Intron 2 | GGTCCACATGGCCCTA | eekddddddddddkke | 90 | 1840 |
| 541808 | 178895 | 178910 | Intron 2 | CAGGCCCAGGATTGTC | eekddddddddddkke | 81 | 1841 |
| 541809 | 179444 | 179459 | Intron 2 | GGGCCTGCTTTGCAGC | eekddddddddddkke | 81 | 1842 |
| 541810 | 179863 | 179878 | Intron 2 | ACTCCTCTCTTTAGGC | eekddddddddddkke | 87 | 1843 |
| 541811 | 180524 | 180539 | Intron 2 | CTGGGTAACAGTCCTC | eekddddddddddkke | 98 | 1844 |
| 541812 | 181528 | 181543 | Intron 2 | ACTGTATGGTTTCCAC | eekddddddddddkke | 83 | 1845 |
| 541813 | 182103 | 182118 | Intron 2 | GCCAAAGATAGCTCTT | eekddddddddddkke | 94 | 1846 |
| 541814 | 182978 | 182993 | Intron 2 | GGCATTGGAAGTTGGT | eekddddddddddkke | 87 | 1847 |
| 541815 | 183193 | 183208 | Intron 2 | CCCTTCCTGACCTTAC | eekddddddddddkke | 55 | 1848 |
| 541816 | 183658 | 183673 | Intron 2 | TTACCCTCTATTCACC | eekddddddddddkke | 65 | 1849 |
| 541818 | 184501 | 184516 | Intron 2 | GGCACCCCAGGCCGGG | eekddddddddddkke | 25 | 1850 |
| 541819 | 185080 | 185095 | Intron 2 | CAGCAGCTAGTTCCCC | eekddddddddddkke | 96 | 1851 |
| 541820 | 185327 | 185342 | Intron 2 | GTGGGCACTAGTGTGT | eekddddddddddkke | 75 | 1852 |
| 541821 | 185682 | 185697 | Intron 2 | TGCCCTTGTCAGGGCA | eekddddddddddkke | 20 | 1853 |
| 541822 | 186025 | 186040 | Intron 2 | GCAGATAGGCTCAGCA | eekddddddddddkke | 98 | 1854 |
| 541823 | 186570 | 186585 | Intron 2 | CCCTAGCCCTTAGCAC | eekddddddddddkke | 44 | 1855 |
| 541824 | 186841 | 186856 | Intron 2 | ACTGGAATGGCCCTCT | eekddddddddddkke | 86 | 1856 |
| 541825 | 187176 | 187191 | Intron 2 | TTTGCTCATGCTCACA | eekddddddddddkke | 96 | 1857 |
| 541826 | 187629 | 187644 | Intron 2 | GCCTTTGTGTGTCACT | eekddddddddddkke | 99 | 1858 |
| 541827 | 187857 | 187872 | Intron 2 | TATGTGGTAGCATGTC | eekddddddddddkke | 96 | 1859 |
| 541828 | 188442 | 188457 | Intron 2 | CCCCAGGAAGTTGGCC | eekddddddddddkke | 68 | 1860 |
| 541829 | 189086 | 189101 | Intron 2 | TAGCTGTCAAGGCCCT | eekddddddddddkke | 90 | 1861 |
| 541830 | 189534 | 189549 | Intron 2 | CCTAGTCAGCCACTAG | eekddddddddddkke | 20 | 1862 |
| 541831 | 189889 | 189904 | Intron 2 | AGACTCCCCATCAGCC | eekddddddddddkke | 74 | 1863 |
| 541832 | 190172 | 190187 | Intron 2 | GTGAAGGGCCTTCATC | eekddddddddddkke | 68 | 1864 |
| 541833 | 190961 | 190976 | Intron 2 | GGTTGAGAGTCCAATG | eekddddddddddkke | 95 | 1865 |
| 541834 | 191404 | 191419 | Intron 2 | CAGCTAATTCCCTCAT | eekddddddddddkke | 79 | 1866 |
| 541835 | 191614 | 191629 | Intron 2 | TTGTGTCTCAACCCAC | eekddddddddddkke | 95 | 1867 |
| 541836 | 191999 | 192014 | Intron 2 | GGCTATGCTGCATGCT | eekddddddddddkke | 91 | 1868 |
| 541837 | 192860 | 192875 | Intron 2 | CCCCATACCCAGTGGA | eekddddddddddkke | 71 | 1869 |
| 541838 | 193460 | 193475 | Intron 2 | GGTGGTTTTCCTCCCT | eekddddddddddkke | 95 | 1870 |
| 541839 | 194144 | 194159 | Intron 2 | GAGCCTGCCCAACTTT | eekddddddddddkke | 90 | 1871 |
| 541840 | 194425 | 194440 | Intron 2 | TGATGCCCAAGAGTGA | eekddddddddddkke | 85 | 1872 |
| 541841 | 194953 | 194968 | Intron 2 | TTCCCTCTGCGAACAT | eekddddddddddkke | 96 | 1873 |
| 541842 | 195428 | 195443 | Intron 2 | GTTCCATCTCAATCCA | eekddddddddddkke | 94 | 1874 |
| 541843 | 196858 | 196873 | Intron 2 | ACGGCCACTCCACTGG | eekddddddddddkke | 44 | 1875 |
| 541844 | 197326 | 197341 | Intron 2 | TGGAAGTGGTTCCAGA | eekddddddddddkke | 90 | 1876 |
| 541845 | 197946 | 197961 | Intron 2 | TTGCCCCAGACCAACA | eekddddddddddkke | 47 | 1877 |
| 541846 | 198366 | 198381 | Intron 2 | GAGGTTGTGGAGGTGC | eekddddddddddkke | 26 | 1878 |
| 541847 | 198715 | 198730 | Intron 2 | GAGTTGCTGTGTGTGA | eekddddddddddkke | 83 | 1879 |
| 541848 | 198939 | 198954 | Intron 2 | CATGTCAGAGGTGTCC | eekddddddddddkke | 93 | 1880 |
| 541849 | 199506 | 199521 | Intron 2 | AGGTAAGGATCATGGC | eekddddddddddkke | 87 | 1881 |
| 541850 | 199816 | 199831 | Intron 2 | GTTCAGTTGCATCACG | eekddddddddddkke | 90 | 1882 |
| 541851 | 200249 | 200264 | Intron 2 | GCCCAGCTAGCCACCC | eekddddddddddkke | 68 | 1883 |
| 541852 | 201258 | 201273 | Intron 2 | CCTTAGCAGCCAGGCC | eekddddddddddkke | 86 | 1884 |
| 541853 | 202079 | 202094 | Intron 2 | GCACTTAGGGTTTTGC | eekddddddddddkke | 94 | 1885 |
| 541854 | 202382 | 202397 | Intron 2 | GTTGAACTTTCCCTAC | eekddddddddddkke | 53 | 1886 |
| 541855 | 202702 | 202717 | Intron 2 | TGACTCCTTGAGACAG | eekddddddddddkke | 83 | 1887 |
| 541856 | 203098 | 203113 | Intron 2 | TGCGCTGGCTTAGCAA | eekddddddddddkke | 59 | 1888 |
| 541857 | 203464 | 203479 | Intron 2 | GGCCTAACATCAGCAG | eekddddddddddkke | 88 | 1889 |
| 541858 | 204212 | 204227 | Intron 2 | ACTCCTCCCAGTTAGC | eekddddddddddkke | 70 | 1890 |
| 541859 | 205630 | 205645 | Intron 2 | ACCAGTGGCCAATGTC | eekddddddddddkke | 92 | 1891 |
| 541861 | 206422 | 206437 | Intron 2 | GCCTAGACACAGTAGG | eekddddddddddkke | 70 | 1892 |
| 541862 | 206749 | 206764 | Intron 2 | TATTCTCCCCCTAGGG | eekddddddddddkke | 42 | 1893 |
| 541863 | 207517 | 207532 | Intron 2 | GACGGCCTTGGGCACA | eekddddddddddkke | 96 | 1894 |
| | 210196 | 210211 | | | | | |
| 541865 | 208659 | 208674 | Intron 3 | GCAGGCTGTATTAGCA | eekddddddddddkke | 15 | 1895 |
| 541867 | 209999 | 210014 | Intron 3 | ACCCCCTATCCTGCAC | eekddddddddddkke | 58 | 1896 |
| 541868 | 210281 | 210296 | Intron 3 | TCCTCCATACCTAGAG | eekddddddddddkke | 61 | 1897 |
| | 211033 | 211048 | | | | | |
| 541869 | 210502 | 210517 | Intron 3 | GATAGGTGCCCACTGT | eekddddddddddkke | 80 | 1898 |
| 541870 | 210920 | 210935 | Intron 3 | GTCAGTTCTGGCTAGG | eekddddddddddkke | 97 | 1899 |
| 541871 | 211269 | 211284 | Intron 3 | GCCTGAACTTACAAGC | eekddddddddddkke | 68 | 1900 |
| 541872 | 211836 | 211851 | Intron 3 | ACCCTGGGCTGACCTT | eekddddddddddkke | 92 | 1901 |
| 541873 | 212606 | 212621 | Intron 3 | GGACCTGGACAAGCAA | eekddddddddddkke | 97 | 1902 |
| 541874 | 213099 | 213114 | Intron 3 | CTCCTTGCGAGAGAGG | eekddddddddddkke | 7 | 1903 |
| 541875 | 213425 | 213440 | Intron 3 | AGAGTTGACATGGGCA | eekddddddddddkke | 96 | 1904 |
| 541876 | 213846 | 213861 | Intron 3 | CACTAGGTCCCTGACC | eekddddddddddkke | 37 | 1905 |
| 541877 | 214483 | 214498 | Intron 3 | CACTCTCTTGGGCTGT | eekddddddddddkke | 94 | 1906 |
| 541878 | 214884 | 214899 | Intron 3 | AGGGACCTGCATTCCA | eekddddddddddkke | 72 | 1907 |

TABLE 60
Inhibition of GHR mRNA by deoxy, MOE and cEt gapmers targeting introns 2
and 3 of SEQ ID NO: 2

| | SEQ ID | SEQ ID | | | | | |
|---|---|---|---|---|---|---|---|
| | NO: 2 | NO: 2 | | | | | |
| ISIS | Start | Stop | Target | | | % | SEQ |
| NO | Site | Site | Region | Sequence | Chemistry | inhibition | ID NO |
| 541262 | 156891 | 156906 | Intron 2 | TTGGTTTGTCAATCCT | eekddddddddddkke | 91 | 1370 |
| 541879 | 215493 | 215508 | Intron 3 | TTCACCACCCATTGGG | eekddddddddddkke | 63 | 1908 |
| 541880 | 216192 | 216207 | Intron 3 | ATCTGGTCTGAGGGCC | eekddddddddddkke | 92 | 1909 |
| 541881 | 216458 | 216473 | Intron 3 | GACATGCAATTGACCC | eekddddddddddkke | 98 | 1910 |
| 541882 | 217580 | 217595 | Intron 3 | GTGTGCAGCAGACTGT | eekddddddddddkke | 92 | 1911 |
| 541883 | 218233 | 218248 | Intron 3 | GACAGTCCAGCTGCAA | eekddddddddddkke | 84 | 1912 |
| 541884 | 218526 | 218541 | Intron 3 | CCTGCGGCAGTGAAGA | eekddddddddddkke | 85 | 1913 |
| 541885 | 218734 | 218749 | Intron 3 | CTCTGAGGATAACCCT | eekddddddddddkke | 76 | 1914 |
| 541886 | 219342 | 219357 | Intron 3 | GTTCCCAGCTCCCCAA | eekddddddddddkke | 68 | 1915 |
| 541887 | 219618 | 219633 | Intron 3 | TAGGGTCAGTGTCCCA | eekddddddddddkke | 79 | 1916 |
| 541888 | 220039 | 220054 | Intron 3 | GGCGAGCCTCTCAGCC | eekddddddddddkke | 52 | 1917 |
| 541889 | 220393 | 220408 | Intron 3 | GACTCATCCAGGCAGT | eekddddddddddkke | 91 | 1918 |
| 541890 | 220665 | 220680 | Intron 3 | TCCCTCCCTTAGGCAC | eekddddddddddkke | 71 | 1919 |
| 541891 | 221044 | 221059 | Intron 3 | GAGGAGCCAGGCATAT | eekddddddddddkke | 80 | 1920 |
| 541892 | 221562 | 221577 | Intron 3 | CACCAACGAAGTCCCC | eekddddddddddkke | 89 | 1921 |
| 541893 | 221947 | 221962 | Intron 3 | GCTGGCAGTCACCAAA | eekddddddddddkke | 90 | 1922 |
| 541894 | 222569 | 222584 | Intron 3 | GCCCACACCATTGAGC | eekddddddddddkke | 70 | 1923 |
| 541895 | 222983 | 222998 | Intron 3 | AGTGAGATGCCCTGGT | eekddddddddddkke | 92 | 1924 |
| 541896 | 223436 | 223451 | Intron 3 | CACTGGCAGTTAGACC | eekddddddddddkke | 88 | 1925 |
| 541897 | 224107 | 224122 | Intron 3 | ACTCTGGCCACTAGTA | eekddddddddddkke | 80 | 1926 |
| 541898 | 224731 | 224746 | Intron 3 | GGTAGGGTGGCCACAT | eekddddddddddkke | 78 | 1927 |
| 541899 | 225133 | 225148 | Intron 3 | GAGCCATGTCTAGGCA | eekddddddddddkke | 18 | 1928 |
| 541900 | 225465 | 225480 | Intron 3 | CAGACTGAAACCCACC | eekddddddddddkke | 86 | 1929 |
| 541901 | 225671 | 225686 | Intron 3 | TATGGTCCAGCCACCA | eekddddddddddkke | 76 | 1930 |
| 541902 | 226110 | 226125 | Intron 3 | TACCTCCTCTGTTGGT | eekddddddddddkke | 36 | 1931 |
| 541903 | 227025 | 227040 | Intron 3 | ACACCTCAGTCATGAT | eekddddddddddkke | 92 | 1932 |
| 541904 | 227236 | 227251 | Intron 3 | AACAGGCTTCAAGAGG | eekddddddddddkke | 91 | 1933 |
| 541905 | 227485 | 227500 | Intron 3 | GTACTACTGGCCATGT | eekddddddddddkke | 73 | 1934 |
| 541906 | 227914 | 227929 | Intron 3 | CTGCAGGCGGTTGCTA | eekddddddddddkke | 60 | 1935 |
| 541907 | 228718 | 228733 | Intron 3 | GTCTGTTGCCAAGAGC | eekddddddddddkke | 95 | 1936 |
| 541908 | 229174 | 229189 | Intron 3 | CCCTGGGTCACTTAAG | eekddddddddddkke | 44 | 1937 |
| 541909 | 229423 | 229438 | Intron 3 | CCTGTCCTTGCTTGCA | eekddddddddddkke | 96 | 1938 |
| 541910 | 230042 | 230057 | Intron 3 | GCCCAGCTTATCCTAA | eekddddddddddkke | 78 | 1939 |
| 541911 | 230313 | 230328 | Intron 3 | AGTAGAGCCTTTGCCT | eekddddddddddkke | 75 | 1940 |
| 541912 | 230580 | 230595 | Intron 3 | CTGTCTCTTGGCCCAT | eekddddddddddkke | 80 | 1941 |
| 541913 | 231330 | 231345 | Intron 3 | GGCCCAAATCTTGAGT | eekddddddddddkke | 67 | 1942 |
| 541914 | 231817 | 231832 | Intron 3 | GCTTGTTACAGCACTA | eekddddddddddkke | 92 | 1943 |
| 541915 | 232088 | 232103 | Intron 3 | ACTTTGGCCCAGAGAT | eekddddddddddkke | 51 | 1944 |
| 541916 | 232884 | 232899 | Intron 3 | GCAGTCAGGTCAGCTG | eekddddddddddkke | 75 | 1945 |
| 541917 | 233210 | 233225 | Intron 3 | GCCTTGTCCTACTACC | eekddddddddddkke | 65 | 1946 |
| 541918 | 233657 | 233672 | Intron 3 | GGCTCTGCTATTGGCC | eekddddddddddkke | 59 | 1947 |
| 541919 | 233998 | 234013 | Intron 3 | CTTATAGAGCCTTGCC | eekddddddddddkke | 59 | 1948 |
| 541920 | 234296 | 234311 | Intron 3 | GGAAGGGCCCAAATAT | eekddddddddddkke | 15 | 1949 |
| 541921 | 234903 | 234918 | Intron 3 | GATCTACTCCTACTGC | eekddddddddddkke | 65 | 1950 |
| 541922 | 235313 | 235328 | Intron 3 | GTCAGCCTGTGTCTGA | eekddddddddddkke | 45 | 1951 |
| 541923 | 235770 | 235785 | Intron 3 | AGCTTCCTCCTTACAC | eekddddddddddkke | 54 | 1952 |
| 541924 | 236198 | 236213 | Intron 3 | CTGCTAAGCCCCTACC | eekddddddddddkke | 59 | 1953 |
| 541925 | 236684 | 236699 | Intron 3 | AGAGGTCAGGTGCATA | eekddddddddddkke | 77 | 1954 |
| 541926 | 237055 | 237070 | Intron 3 | TTCAGCCTGGTTGGGA | eekddddddddddkke | 71 | 1955 |
| 541927 | 237585 | 237600 | Intron 3 | GATTGATTGAGCTCCT | eekddddddddddkke | 86 | 1956 |
| 541928 | 237949 | 237964 | Intron 3 | ATGGACTCCCTAGGCT | eekddddddddddkke | 61 | 1957 |
| 541929 | 238542 | 238557 | Intron 3 | TACTCAAGGGCCCCTC | eekddddddddddkke | 67 | 1958 |
| 541930 | 245319 | 245334 | Intron 3 | GGCATATGTAGCTTGC | eekddddddddddkke | 91 | 1959 |
| 541931 | 245765 | 245780 | Intron 3 | GAGCTTAGATCTGTGC | eekddddddddddkke | 73 | 1960 |
| 541932 | 246251 | 246266 | Intron 3 | ATGCTCACGGCTGTGT | eekddddddddddkke | 81 | 1961 |
| 541933 | 246500 | 246515 | Intron 3 | ATTGAAAGGCCCATCA | eekddddddddddkke | 45 | 1962 |
| 541934 | 246936 | 246951 | Intron 3 | CAACCCAGTTTGCCGG | eekddddddddddkke | 71 | 1963 |
| 541935 | 247225 | 247240 | Intron 3 | CAGCTATTCCCTGTTT | eekddddddddddkke | 53 | 1964 |
| 541936 | 247644 | 247659 | Intron 3 | GCTGTGTCACACTTCC | eekddddddddddkke | 98 | 1965 |
| 541937 | 248223 | 248238 | Intron 3 | GTCCAAGGATCACAGC | eekddddddddddkke | 86 | 1966 |
| 541938 | 248695 | 248710 | Intron 3 | GCTACCACTAGAGCCT | eekddddddddddkke | 81 | 1967 |
| 541939 | 249494 | 249509 | Intron 3 | GTTTCAGGGCTTATGT | eekddddddddddkke | 63 | 1968 |
| 541940 | 250693 | 250708 | Intron 3 | TCCCACACCTATTGAA | eekddddddddddkke | 51 | 1969 |
| 541941 | 251622 | 251637 | Intron 3 | ACTGACTAGAGAGTCC | eekddddddddddkke | 81 | 1970 |
| 541942 | 251950 | 251965 | Intron 3 | TCCAAGGCTGATGTCC | eekddddddddddkke | 85 | 1971 |
| 541943 | 252665 | 252680 | Intron 3 | TCCCATGGTGGACATG | eekddddddddddkke | 39 | 1972 |
| 541944 | 253140 | 253155 | Intron 3 | AGTAGCTGGCAGAAGG | eekddddddddddkke | 85 | 1973 |
| 541945 | 253594 | 253609 | Intron 3 | CTGGGAGTGACTACTA | eekddddddddddkke | 77 | 1974 |
| 541946 | 254036 | 254051 | Intron 3 | TGGTATAGCTACTGGG | eekddddddddddkke | 84 | 1975 |
| 541947 | 254905 | 254920 | Intron 3 | CTGTGGTTTGGCAGGT | eekddddddddddkke | 90 | 1976 |
| 541948 | 255407 | 255422 | Intron 3 | GTTCTCACCTGAACTA | eekddddddddddkke | 65 | 1977 |
| 541949 | 255618 | 255633 | Intron 3 | ATAGGCTACTGGCAGG | eekddddddddddkke | 89 | 1978 |
| 541950 | 255992 | 256007 | Intron 3 | CCCAGCTAGCTGGAGT | eekddddddddddkke | 50 | 1979 |
| 541951 | 256428 | 256443 | Intron 3 | GGCTGGCTCTCAAAGG | eekddddddddddkke | 61 | 1980 |
| 541952 | 256689 | 256704 | Intron 3 | TGGTGATACTGTGGCA | eekddddddddddkke | 94 | 1981 |
| 541953 | 257317 | 257332 | Intron 3 | GCTGATTTTGGTGCCA | eekddddddddddkke | 92 | 1982 |
| 541954 | 257826 | 257841 | Intron 3 | GCTAATCTTGCCTCGA | eekddddddddddkke | 52 | 1983 |
| 541955 | 258407 | 258422 | Intron 3 | CACTGGTGGCTTTCAA | eekddddddddddkke | 31 | 1984 |

TABLE 61
Inhibition of GHR mRNA by deoxy, MOE and cEt gapmers targeting intronic and
exonic regions of SEQ ID NOs: 1 and 2

| | SEQ ID | | | | | SEQ ID | |
|---|---|---|---|---|---|---|---|
| | NO: 1 | | | | | NO: 2 | |
| ISIS | Start | Target | | | % | Start | SEQ |
| NO | Site | Region | Sequence | Chemistry | inhibition | Site | ID NO |
| 541262 | n/a | Intron 2 | TTGGTTTGTCAATCCT | eekddddddddddkke | 93 | 156891 | 1370 |
| 541956 | n/a | Intron 3 | GTCCCCTTCTTAAGCA | eekddddddddddkke | 56 | 258980 | 1985 |
| 541957 | n/a | Intron 3 | GCCAGGCCAACTGTGG | eekddddddddddkke | 53 | 259290 | 1986 |
| 541958 | n/a | Intron 3 | GGCCCGTTATGGTGGA | eekddddddddddkke | 72 | 259500 | 1987 |
| 541959 | n/a | Intron 3 | CCTAAAGTCCAACTCC | eekddddddddddkke | 76 | 261641 | 1988 |
| 541960 | n/a | Intron 3 | CCCTATCCAGCCTTCA | eekddddddddddkke | 77 | 262021 | 1989 |
| 541961 | n/a | Intron 3 | AAGCATGGCCTCTGGC | eekddddddddddkke | 23 | 262453 | 1990 |
| 541962 | n/a | Intron 3 | TACCCTGCACCCTCCT | eekddddddddddkke | 71 | 262764 | 1991 |
| 541963 | n/a | Intron 3 | TCCTTAGTAGAATGCC | eekddddddddddkke | 82 | 263342 | 1992 |
| 541964 | n/a | Intron 3 | TTAGCCCTGGGAGCAC | eekddddddddddkke | 78 | 263913 | 1993 |
| 541965 | n/a | Intron 3 | GCTGGGTCAGGTAGCG | eekddddddddddkke | 71 | 266503 | 1994 |
| 541966 | n/a | Intron 3 | GGGAGGCTCTCAATCT | eekddddddddddkke | 75 | 266861 | 1995 |
| 541967 | n/a | Intron 3 | GTAAGTGCAGAATGCC | eekddddddddddkke | 87 | 267116 | 1996 |
| 541968 | n/a | Intron 3 | TGCCGAGGCAGGCACC | eekddddddddddkke | 33 | 267380 | 1997 |
| 541969 | n/a | Intron 3 | TCCGTGTCTAGGAGGT | eekddddddddddkke | 84 | 267865 | 1998 |
| 541970 | n/a | Intron 4 | GTCTCCCTGCATTGGA | eekddddddddddkke | 31 | 268366 | 1999 |
| 541971 | n/a | Intron 4 | CCATATCACTCTCCTC | eekddddddddddkke | 79 | 268786 | 2000 |
| 541972 | n/a | Intron 4 | CGAACACCTTGAGCCA | eekddddddddddkke | 90 | 269252 | 2001 |
| 541973 | n/a | Intron 4 | GGCCCAGCTTAAGAGG | eekddddddddddkke | 59 | 270038 | 2002 |
| 541974 | n/a | Intron 4 | CTGATACTCCTAATCC | eekddddddddddkke | 70 | 270501 | 2003 |
| 541975 | n/a | Intron 4 | GCCTGTAGGGCTGTGC | eekddddddddddkke | 82 | 270817 | 2004 |
| 541976 | n/a | Intron 4 | TGCCCTTTCTCCCTAC | eekddddddddddkke | 87 | 271216 | 2005 |
| 541977 | n/a | Intron 4 | AGTGCATGTCAGTACC | eekddddddddddkke | 75 | 271812 | 2006 |
| 541978 | n/a | Intron 4 | TGCTCCTCAGCTGTTG | eekddddddddddkke | 44 | 272631 | 2007 |
| 541979 | n/a | Intron 4 | GTTTGGGACCATCCCT | eekddddddddddkke | 41 | 272834 | 2008 |
| 541980 | n/a | Intron 4 | AGTGCTCTCTAGGGTC | eekddddddddddkke | 87 | 273257 | 2009 |
| 541981 | n/a | Intron 4 | TACAGAGAATCACCCC | eekddddddddddkke | 82 | 273651 | 2010 |
| 541982 | n/a | Intron 4 | GTCCAAGTAAGGTGCT | eekddddddddddkke | 57 | 273947 | 2011 |
| 541983 | n/a | Intron 5 | GACCTTGCAGGCTTCC | eekddddddddddkke | 87 | 274244 | 2012 |
| 541984 | n/a | Intron 5 | GGGCAAAGGATCCTCT | eekddddddddddkke | 71 | 274758 | 2013 |
| 541985 | n/a | Intron 5 | CCCATTCTGCTATCCC | eekddddddddddkke | 92 | 275198 | 2014 |
| 541986 | n/a | Intron 5 | GCTGACTAGGAGGGCT | eekddddddddddkke | 62 | 275732 | 2015 |
| 541987 | n/a | Intron 5 | CCTGTGAGGTAGTACC | eekddddddddddkke | 83 | 276309 | 2016 |
| 541988 | n/a | Intron 5 | GTCCCCCTCCAGTCTA | eekddddddddddkke | 50 | 276932 | 2017 |
| 541989 | n/a | Intron 5 | GAGGACTCAATTCCTC | eekddddddddddkke | 0 | 277149 | 2018 |
| 541990 | n/a | Intron 5 | GACAAGGTCCTTTTGG | eekddddddddddkke | 43 | 277391 | 2019 |
| 541991 | n/a | Intron 5 | GCTCTTGTGTGCACCC | eekddddddddddkke | 90 | 277730 | 2020 |
| 541992 | n/a | Intron 5 | TCACCGCCTGCACCAC | eekddddddddddkke | 75 | 278342 | 2021 |
| 541993 | n/a | Intron 5 | GGTTGCACTGTGCAAT | eekddddddddddkke | 26 | 278917 | 2022 |
| 541994 | n/a | Intron 6 | TTCCACAGGCCTCCAT | eekddddddddddkke | 64 | 279303 | 2023 |
| 541995 | n/a | Intron 6 | GCTGAGTTCCATATGC | eekddddddddddkke | 72 | 279679 | 2024 |
| 541996 | n/a | Intron 6 | GAACCGCCACCTCAGG | eekddddddddddkke | 38 | 280157 | 2025 |
| 541997 | n/a | Intron 6 | GCTCACGGTTGGAGAC | eekddddddddddkke | 42 | 280799 | 2026 |
| 541998 | n/a | Intron 6 | TGGGCTCCCATGTTCA | eekddddddddddkke | 45 | 281595 | 2027 |
| 541999 | n/a | Intron 6 | TCACTCTACCAACCTC | eekddddddddddkke | 33 | 282572 | 2028 |
| 542000 | n/a | Intron 6 | TCCTTGCTTACAGATG | eekddddddddddkke | 33 | 283079 | 2029 |
| 542001 | n/a | Intron 6 | TGATGCTAGCATTACC | eekddddddddddkke | 37 | 283653 | 2030 |
| 542002 | n/a | Intron 6 | TGGGTAACTGGCTAGT | eekddddddddddkke | 47 | 285711 | 2031 |
| 542003 | n/a | Intron 6 | AACCATTCCTCACCAA | eekddddddddddkke | 53 | 287181 | 2032 |
| 542004 | n/a | Intron 6 | GCCCTGAACAGTTGAT | eekddddddddddkke | 37 | 287895 | 2033 |
| 542005 | n/a | Intron 6 | GGCTCCTATCATACCT | eekddddddddddkke | 38 | 288943 | 2034 |
| 542006 | n/a | Intron 6 | TAGGTCTCACAACCCT | eekddddddddddkke | 10 | 289638 | 2035 |
| 542007 | n/a | Intron 6 | GTGCATTAGTCTTCCA | eekddddddddddkke | 74 | 290035 | 2036 |
| 542008 | n/a | Intron 7 | CAAAAGCCAGGTTAGC | eekddddddddddkke | 13 | 290503 | 2037 |
| 542009 | n/a | Intron 7 | CTGCTGTTGACTACCT | eekddddddddddkke | 50 | 290924 | 2038 |
| 542010 | n/a | Intron 7 | GTACCTGCCAGCTACT | eekddddddddddkke | 35 | 291807 | 2039 |
| 542011 | n/a | Exon 8- | CCTACCTTTGCTGTTT | eekddddddddddkke | 12 | 292611 | 2040 |
| | | intron 8 | | | | | |
| | | junction | | | | | |
| 542012 | n/a | Intron 8 | AGTCACCAGCCTAAGC | eekddddddddddkke | 47 | 292860 | 2041 |
| 542013 | n/a | Intron 8 | AGGCAACCTGGGAGTG | eekddddddddddkke | 52 | 293377 | 2042 |
| 542014 | n/a | Intron 8 | TGGCCTTCACAATGGC | eekddddddddddkke | 33 | 294052 | 2043 |
| 542015 | n/a | Intron 8 | GGTGAAGTGGGTTGGA | eekddddddddddkke | 27 | 294536 | 2044 |
| 542016 | n/a | Intron 8 | GCTGGTTGTCTGCTGC | eekddddddddddkke | 60 | 294931 | 2045 |
| 542017 | n/a | Intron 8 | AGTTTGTGACCCCTGC | eekddddddddddkke | 81 | 295475 | 2046 |
| 542018 | n/a | Intron 8 | CCACTCAGTGTGAATG | eekddddddddddkke | 85 | 295955 | 2047 |
| 542019 | n/a | Intron 8 | CTGGCCTCAGGGCAAT | eekddddddddddkke | 51 | 296186 | 2048 |
| 542020 | n/a | Intron 8 | GTAGACTTGGGTAGGT | eekddddddddddkke | 53 | 296680 | 2049 |
| 542022 | n/a | 3′UTR | TGGTGCTAAGCTCTCC | eekddddddddddkke | 67 | 301009 | 2050 |
| 542023 | n/a | 3′UTR | CATGCTCAAGCTGGAA | eekddddddddddkke | 47 | 301280 | 2051 |
| 542024 | 206 | Exon 2 | AAGGTCAACAGCAGCT | eekddddddddddkke | 93 | 144990 | 2052 |
| 542025 | 207 | Exon 2 | CAAGGTCAACAGCAGC | eekddddddddddkke | 85 | 144991 | 2053 |
| 542026 | 208 | Exon 2 | CCAAGGTCAACAGCAG | eekddddddddddkke | 82 | 144992 | 2054 |
| 542027 | 209 | Exon 2 | GCCAAGGTCAACAGCA | eekddddddddddkke | 84 | 144993 | 2055 |

TABLE 62
Inhibition of GHR mRNA by deoxy, MOE and cEt gapmers targeting intronic and exonic regions
of SEQ ID NOs: 1 and 2

| | SEQ ID | | | | | SEQ ID | |
|---|---|---|---|---|---|---|---|
| | NO: 1 | | | | | NO: 2 | |
| ISIS | Start | Target | | | % | Start | SEQ ID |
| NO | Site | Region | Sequence | Chemistry | inhibition | Site | NO |
| 541262 | n/a | Intron 2 | TTGGTTTGTCAATCCT | eekddddddddddkke | 86 | 156891 | 1370 |
| 542034 | 870 | Exon 7 | TCTCACACGCACTTCA | eekddddddddddkke | 49 | 290368 | 2056 |
| 542035 | 871 | Exon 7 | ATCTCACACGCACTTC | eekddddddddddkke | 39 | 290369 | 2057 |
| 542036 | 872 | Exon 7 | GATCTCACACGCACTT | eekddddddddddkke | 50 | 290370 | 2058 |
| 542049 | n/a | Intron 1 | CTTTCATGAATCAAGC | eekddddddddddkke | 85 | 17928 | 2059 |
| 542050 | n/a | Intron 1 | TCTTTCATGAATCAAG | eekddddddddddkke | 54 | 17929 | 2060 |
| 542051 | n/a | Intron 1 | GTCTTTCATGAATCAA | eekddddddddddkke | 96 | 17930 | 2061 |
| 542052 | n/a | Intron 1 | GGTCTTTCATGAATCA | eekddddddddddkke | 98 | 17931 | 2062 |
| 542053 | n/a | Intron 1 | ATGGTCTTTCATGAAT | eekddddddddddkke | 94 | 17933 | 2063 |
| 542054 | n/a | Intron 1 | GATGGTCTTTCATGAA | eekddddddddddkke | 73 | 17934 | 2064 |
| 542055 | n/a | Intron 1 | TGATGGTCTTTCATGA | eekddddddddddkke | 83 | 17935 | 2065 |
| 542056 | n/a | Intron 1 | TATATCAATATTCTCC | eekddddddddddkke | 75 | 21821 | 2066 |
| 542057 | n/a | Intron 1 | TTATATCAATATTCTC | eekddddddddddkke | 23 | 21822 | 2067 |
| 542058 | n/a | Intron 1 | GTTATATCAATATTCT | eekddddddddddkke | 87 | 21823 | 2068 |
| 542059 | n/a | Intron 1 | TTTCTTTAGCAATAGT | eekddddddddddkke | 85 | 22519 | 2069 |
| 542060 | n/a | Intron 1 | CTTTCTTTAGCAATAG | eekddddddddddkke | 81 | 22520 | 2070 |
| 542061 | n/a | Intron 1 | GCTTTCTTTAGCAATA | eekddddddddddkke | 68 | 22521 | 2071 |
| 542062 | n/a | Intron 1 | CTCCATTAGGGTTCTG | eekddddddddddkke | 91 | 50948 | 2072 |
| 542063 | n/a | Intron 1 | TCTCCATTAGGGTTCT | eekddddddddddkke | 88 | 50949 | 2073 |
| 542064 | n/a | Intron 1 | TTCTCCATTAGGGTTC | eekddddddddddkke | 85 | 50950 | 2074 |
| 542065 | n/a | Intron 1 | GTTCTCCATTAGGGTT | eekddddddddddkke | 84 | 50951 | 2075 |
| 542066 | n/a | Intron 1 | AGGTTGGCAGACAGAC | eekddddddddddkke | 92 | 53467 | 2076 |
| 542067 | n/a | Intron 1 | CAGGTTGGCAGACAGA | eekddddddddddkke | 93 | 53468 | 2077 |
| 542068 | n/a | Intron 1 | GCAGGTTGGCAGACAG | eekddddddddddkke | 91 | 53469 | 2078 |
| 542069 | n/a | Intron 1 | CTTCTTGTGAGCTGGC | eekddddddddddkke | 95 | 64885 | 2079 |
| 542070 | n/a | Intron 1 | TCTTCTTGTGAGCTGG | eekddddddddddkke | 89 | 64886 | 2080 |
| 542071 | n/a | Intron 1 | GTCTTCTTGTGAGCTG | eekddddddddddkke | 96 | 64887 | 2081 |
| 542072 | n/a | Intron 1 | AGTCTTCTTGTGAGCT | eekddddddddddkke | 81 | 64888 | 2082 |
| 542073 | n/a | Intron 1 | TCTTCCACTCACATCC | eekddddddddddkke | 89 | 65991 | 2083 |
| 542074 | n/a | Intron 1 | CTCTTCCACTCACATC | eekddddddddddkke | 79 | 65992 | 2084 |
| 542075 | n/a | Intron 1 | TCTCTTCCACTCACAT | eekddddddddddkke | 86 | 65993 | 2085 |
| 542076 | n/a | Intron 1 | GTCTCTTCCACTCACA | eekddddddddddkke | 92 | 65994 | 2086 |
| 542077 | n/a | Intron 1 | ATAGATTTTGACTTCC | eekddddddddddkke | 86 | 72108 | 2087 |
| 542078 | n/a | Intron 1 | CATAGATTTTGACTTC | eekddddddddddkke | 42 | 72109 | 2088 |
| 542079 | n/a | Intron 1 | GCATAGATTTTGACTT | eekddddddddddkke | 66 | 72110 | 2089 |
| 542080 | n/a | Intron 1 | AAATGTCAACAGTGCA | eekddddddddddkke | 97 | 80639 | 2090 |
| 542081 | n/a | Intron 1 | CATGACTATGTTCTGG | eekddddddddddkke | 68 | 125595 | 2091 |
| 542082 | n/a | Intron 1 | ACATGACTATGTTCTG | eekddddddddddkke | 66 | 125596 | 2092 |
| 542083 | n/a | Intron 1 | CACATGACTATGTTCT | eekddddddddddkke | 74 | 125597 | 2093 |
| 542084 | n/a | Intron 2 | GAATTCTGAGCTCTGG | eekddddddddddkke | 91 | 145430 | 2094 |
| 542085 | n/a | Intron 2 | TGAATTCTGAGCTCTG | eekddddddddddkke | 94 | 145431 | 2095 |
| 542086 | n/a | Intron 2 | CTGAATTCTGAGCTCT | eekddddddddddkke | 94 | 145432 | 2096 |
| 542087 | n/a | Intron 2 | CCTGAATTCTGAGCTC | eekddddddddddkke | 93 | 145433 | 2097 |
| 542088 | n/a | Intron 2 | GCCTGAATTCTGAGCT | eekddddddddddkke | 87 | 145434 | 2098 |
| 542089 | n/a | Intron 2 | AGCCTGAATTCTGAGC | eekddddddddddkke | 84 | 145435 | 2099 |
| 542090 | n/a | Intron 2 | ATATTGTAATTCTTGG | eekddddddddddkke | 47 | 148060 | 2100 |
| 542091 | n/a | Intron 2 | GATATTGTAATTCTTG | eekddddddddddkke | 61 | 148061 | 2101 |
| 542092 | n/a | Intron 2 | TGATATTGTAATTCTT | eekddddddddddkke | 0 | 148062 | 2102 |
| 542093 | n/a | Intron 2 | CTGATATTGTAATTCT | eekddddddddddkke | 58 | 148063 | 2103 |
| 542094 | n/a | Intron 2 | CCTGATATTGTAATTC | eekddddddddddkke | 95 | 148064 | 2104 |
| 542095 | n/a | Intron 2 | GCCTGATATTGTAATT | eekddddddddddkke | 85 | 148065 | 2105 |
| 542096 | n/a | Intron 2 | TGCCTGATATTGTAAT | eekddddddddddkke | 86 | 148066 | 2106 |
| 542097 | n/a | Intron 2 | ATTATGTGCTTTGCCT | eekddddddddddkke | 86 | 148907 | 2107 |
| 542098 | n/a | Intron 2 | AATTATGTGCTTTGCC | eekddddddddddkke | 75 | 148908 | 2108 |
| 542099 | n/a | Intron 2 | CAATTATGTGCTTTGC | eekddddddddddkke | 88 | 148909 | 2109 |
| 542100 | n/a | Intron 2 | TCAATTATGTGCTTTG | eekddddddddddkke | 78 | 148910 | 2110 |
| 542101 | n/a | Intron 2 | GTCAATTATGTGCTTT | eekddddddddddkke | 97 | 148911 | 2111 |
| 542102 | n/a | Intron 2 | GCCATCACCAAACACC | eekddddddddddkke | 97 | 150973 | 2112 |
| 542103 | n/a | Intron 2 | TGCCATCACCAAACAC | eekddddddddddkke | 90 | 150974 | 2113 |
| 542104 | n/a | Intron 2 | TTGCCATCACCAAACA | eekddddddddddkke | 89 | 150975 | 2114 |
| 542105 | n/a | Intron 2 | TGGTGACTCTGCCTGA | eekddddddddddkke | 98 | 151388 | 2115 |
| 542106 | n/a | Intron 2 | CTGGTGACTCTGCCTG | eekddddddddddkke | 96 | 151389 | 2116 |
| 542107 | n/a | Intron 2 | GCTGGTGACTCTGCCT | eekddddddddddkke | 98 | 151390 | 2117 |
| 542108 | n/a | Intron 2 | TGCTGGTGACTCTGCC | eekddddddddddkke | 97 | 151391 | 2118 |
| 542109 | n/a | Intron 2 | CTGCTGGTGACTCTGC | eekddddddddddkke | 93 | 151392 | 2119 |

TABLE 63
Inhibition of GHR mRNA by deoxy, MOE and cEt gapmers targeting introns 2 and
3 of SEQ ID NO: 2

| | SEQ ID | SEQ ID | | | | | |
|---|---|---|---|---|---|---|---|
| | NO: 2 | NO: 2 | | | | | |
| ISIS | Start | Stop | Target | | | % | SEQ ID |
| NO | Site | Site | Region | Sequence | Chemisty | inhibition | NO |
| 541262 | 156891 | 156906 | Intron 2 | TTGGTTTGTCAATCCT | eekddddddddddkke | 95 | 1370 |
| 542110 | 153002 | 153017 | Intron 2 | AGTAGTCAATATTATT | eekddddddddddkke | 74 | 2120 |
| 542111 | 153003 | 153018 | Intron 2 | CAGTAGTCAATATTAT | eekddddddddddkke | 55 | 2121 |
| 542112 | 153004 | 153019 | Intron 2 | CCAGTAGTCAATATTA | eekddddddddddkke | 97 | 2122 |
| 542113 | 153922 | 153937 | Intron 2 | CCTTTGGGTGAATAGC | eekddddddddddkke | 90 | 2123 |
| 542114 | 153923 | 153938 | Intron 2 | ACCTTTGGGTGAATAG | eekddddddddddkke | 71 | 2124 |
| 542115 | 153924 | 153939 | Intron 2 | CACCTTTGGGTGAATA | eekddddddddddkke | 78 | 2125 |
| 542116 | 155595 | 155610 | Intron 2 | CAACTTGAGGACAATA | eekddddddddddkke | 89 | 2126 |
| 542118 | 155597 | 155612 | Intron 2 | CTCAACTTGAGGACAA | eekddddddddddkke | 98 | 2127 |
| 542119 | 156395 | 156410 | Intron 2 | CAGGAAGAAAGGAACC | eekddddddddddkke | 95 | 2128 |
| 542120 | 156396 | 156411 | Intron 2 | CCAGGAAGAAAGGAAC | eekddddddddddkke | 83 | 2129 |
| 542121 | 156397 | 156412 | Intron 2 | ACCAGGAAGAAAGGAA | eekddddddddddkke | 90 | 2130 |
| 542122 | 156595 | 156610 | Intron 2 | TGCAGTCATGTACACA | eekddddddddddkke | 97 | 2131 |
| 542123 | 156596 | 156611 | Intron 2 | CTGCAGTCATGTACAC | eekddddddddddkke | 90 | 2132 |
| 542124 | 156597 | 156612 | Intron 2 | TCTGCAGTCATGTACA | eekddddddddddkke | 81 | 2133 |
| 542125 | 156890 | 156905 | Intron 2 | TGGTTTGTCAATCCTT | eekddddddddddkke | 97 | 2134 |
| 542126 | 156892 | 156907 | Intron 2 | CTTGGTTTGTCAATCC | eekddddddddddkke | 99 | 2135 |
| 542127 | 157204 | 157219 | Intron 2 | GCTACAATGCACAGGA | eekddddddddddkke | 98 | 2136 |
| 542128 | 157205 | 157220 | Intron 2 | TGCTACAATGCACAGG | eekddddddddddkke | 98 | 2137 |
| 542129 | 158008 | 158023 | Intron 2 | GATATTTATTGCTGTA | eekddddddddddkke | 61 | 2138 |
| 542130 | 158009 | 158024 | Intron 2 | TGATATTTATTGCTGT | eekddddddddddkke | 41 | 2139 |
| 542131 | 158010 | 158025 | Intron 2 | CTGATATTTATTGCTG | eekddddddddddkke | 86 | 2140 |
| 542132 | 162752 | 162767 | Intron 2 | AGGGTCTTTACAAAGT | eekddddddddddkke | 69 | 2141 |
| 542133 | 162753 | 162768 | Intron 2 | CAGGGTCTTTACAAAG | eekddddddddddkke | 71 | 2142 |
| 542134 | 162754 | 162769 | Intron 2 | CCAGGGTCTTTACAAA | eekddddddddddkke | 93 | 2143 |
| 542135 | 166353 | 166368 | Intron 2 | TTCTGCAGTATCCTAG | eekddddddddddkke | 84 | 2144 |
| 542136 | 166354 | 166369 | Intron 2 | TTTCTGCAGTATCCTA | eekddddddddddkke | 88 | 2145 |
| 542137 | 166355 | 166370 | Intron 2 | GTTTCTGCAGTATCCT | eekddddddddddkke | 95 | 2146 |
| 542138 | 166356 | 166371 | Intron 2 | AGTTTCTGCAGTATCC | eekddddddddddkke | 92 | 2147 |
| 542139 | 166357 | 166372 | Intron 2 | CAGTTTCTGCAGTATC | eekddddddddddkke | 93 | 2148 |
| 542140 | 172747 | 172762 | Intron 2 | CAAATTCCAGTCCTAG | eekddddddddddkke | 73 | 2149 |
| 542141 | 172748 | 172763 | Intron 2 | CCAAATTCCAGTCCTA | eekddddddddddkke | 91 | 2150 |
| 542142 | 172749 | 172764 | Intron 2 | TCCAAATTCCAGTCCT | eekddddddddddkke | 90 | 2151 |
| 542143 | 175372 | 175387 | Intron 2 | ACCCATTTCATCCATT | eekddddddddddkke | 94 | 2152 |
| 542144 | 175373 | 175388 | Intron 2 | AACCCATTTCATCCAT | eekddddddddddkke | 93 | 2153 |
| 542145 | 175374 | 175389 | Intron 2 | GAACCCATTTCATCCA | eekddddddddddkke | 97 | 2154 |
| 542146 | 175375 | 175390 | Intron 2 | GGAACCCATTTCATCC | eekddddddddddkke | 96 | 2155 |
| 542147 | 175376 | 175391 | Intron 2 | AGGAACCCATTTCATC | eekddddddddddkke | 68 | 2156 |
| 542148 | 189120 | 189135 | Intron 2 | GCTTCATGTCTTTCTA | eekddddddddddkke | 90 | 2157 |
| 542149 | 189121 | 189136 | Intron 2 | TGCTTCATGTCTTTCT | eekddddddddddkke | 96 | 2158 |
| 542150 | 189122 | 189137 | Intron 2 | GTGCTTCATGTCTTTC | eekddddddddddkke | 97 | 2159 |
| 542151 | 189485 | 189500 | Intron 2 | TGAGCTTAGCAGTCAC | eekddddddddddkke | 92 | 2160 |
| 542152 | 189486 | 189501 | Intron 2 | ATGAGCTTAGCAGTCA | eekddddddddddkke | 95 | 2161 |
| 542153 | 189487 | 189502 | Intron 2 | CATGAGCTTAGCAGTC | eekddddddddddkke | 95 | 2162 |
| 542154 | 191143 | 191158 | Intron 2 | TACAGACATAGCTCTA | eekddddddddddkke | 91 | 2163 |
| 542155 | 191144 | 191159 | Intron 2 | ATACAGACATAGCTCT | eekddddddddddkke | 74 | 2164 |
| 542156 | 191145 | 191160 | Intron 2 | GATACAGACATAGCTC | eekddddddddddkke | 91 | 2165 |
| 542157 | 191146 | 191161 | Intron 2 | GGATACAGACATAGCT | eekddddddddddkke | 94 | 2166 |
| 542158 | 198149 | 198164 | Intron 2 | TGTGGCTTTAATTCAC | eekddddddddddkke | 71 | 2167 |
| 542159 | 198150 | 198165 | Intron 2 | ATGTGGCTTTAATTCA | eekddddddddddkke | 81 | 2168 |
| 542160 | 198151 | 198166 | Intron 2 | TATGTGGCTTTAATTC | eekddddddddddkke | 78 | 2169 |
| 542161 | 199817 | 199832 | Intron 2 | TGTTCAGTTGCATCAC | eekddddddddddkke | 91 | 2170 |
| 542162 | 199818 | 199833 | Intron 2 | GTGTTCAGTTGCATCA | eekddddddddddkke | 89 | 2171 |
| 542163 | 199819 | 199834 | Intron 2 | TGTGTTCAGTTGCATC | eekddddddddddkke | 90 | 2172 |
| 542164 | 210562 | 210577 | Intron 3 | CATCTGGATGTGAGGC | eekddddddddddkke | 90 | 2173 |
| 542165 | 210563 | 210578 | Intron 3 | ACATCTGGATGTGAGG | eekddddddddddkke | 78 | 2174 |
| 542166 | 210564 | 210579 | Intron 3 | CACATCTGGATGTGAG | eekddddddddddkke | 55 | 2175 |
| 542167 | 219020 | 219035 | Intron 3 | TCAGGTAATTTCTGGA | eekddddddddddkke | 82 | 2176 |
| 542168 | 219021 | 219036 | Intron 3 | CTCAGGTAATTTCTGG | eekddddddddddkke | 73 | 2177 |
| 542169 | 219022 | 219037 | Intron 3 | TCTCAGGTAATTTCTG | eekddddddddddkke | 40 | 2178 |
| 542170 | 225568 | 225583 | Intron 3 | TGCTTATTTACCTGGG | eekddddddddddkke | 90 | 2179 |
| 542171 | 225569 | 225584 | Intron 3 | TTGCTTATTTACCTGG | eekddddddddddkke | 90 | 2180 |
| 542172 | 225570 | 225585 | Intron 3 | TTTGCTTATTTACCTG | eekddddddddddkke | 79 | 2181 |
| 542173 | 225571 | 225586 | Intron 3 | TTTTGCTTATTTACCT | eekddddddddddkke | 32 | 2182 |
| 542174 | 229619 | 229634 | Intron 3 | ATGATGTTACTACTAC | eekddddddddddkke | 63 | 2183 |
| 542175 | 229620 | 229635 | Intron 3 | AATGATGTTACTACTA | eekddddddddddkke | 53 | 2184 |
| 542176 | 229621 | 229636 | Intron 3 | CAATGATGTTACTACT | eekddddddddddkke | 12 | 2185 |
| 542177 | 232827 | 232842 | Intron 3 | CCCCTAGAGCAATGGT | eekddddddddddkke | 76 | 2186 |
| 542178 | 232828 | 232843 | Intron 3 | CCCCCTAGAGCAATGG | eekddddddddddkke | 83 | 2187 |
| 542179 | 232829 | 232844 | Intron 3 | TCCCCCTAGAGCAATG | eekddddddddddkke | 49 | 2188 |
| 542180 | 237676 | 237691 | Intron 3 | TCAATTGCAGATGCTC | eekddddddddddkke | 88 | 2189 |
| 542181 | 237677 | 237692 | Intron 3 | CTCAATTGCAGATGCT | eekddddddddddkke | 90 | 2190 |
| 542182 | 237678 | 237693 | Intron 3 | GCTCAATTGCAGATGC | eekddddddddddkke | 81 | 2191 |
| 542183 | 237679 | 237694 | Intron 3 | AGCTCAATTGCAGATG | eekddddddddddkke | 85 | 2192 |
| 542184 | 248232 | 248247 | Intron 3 | GTATATTCAGTCCAAG | eekddddddddddkke | 90 | 2193 |
| 542185 | 248233 | 248248 | Intron 3 | AGTATATTCAGTCCAA | eekddddddddddkke | 94 | 2194 |
| 542186 | 248234 | 248249 | Intron 3 | CAGTATATTCAGTCCA | eekddddddddddkke | 97 | 2195 |

TABLE 64
Inhibition of GHR mRNA by deoxy, MOE and cEt gapmers targeting intronic and exonic regions of
SEQ ID NOs: 1 and 2

| | SEQ ID | | | | | SEQ ID | |
|---|---|---|---|---|---|---|---|
| | NO: 1 | | | | | NO: 2 | |
| ISIS | Start | Target | | | % | Start | SEQ ID |
| NO | Site | Region | Sequence | Chemistry | inhibition | Site | NO |
| 541262 | n/a | Intron 2 | TTGGTTTGTCAATCCT | eekddddddddddkke | 93 | 156891 | 13 |
| 545316 | 168 | exon 1- | ACCTCCGAGCTTCGCC | eekddddddddddkke | 80 | 3044 | 21 |
| | | intron 1 | | | | | |
| | | junction | | | | | |
| 545317 | 173 | exon-exon | GTAGGACCTCCGAGCT | eekddddddddddkke | 74 | n/a | 21 |
| | | junction | | | | | |
| 545318 | 177 | exon-exon | ACCTGTAGGACCTCCG | eekddddddddddkke | 70 | n/a | 21 |
| | | junction | | | | | |
| 545321 | 213 | Exon 2 | CAGTGCCAAGGTCAAC | eekddddddddddkke | 77 | 144997 | 21 |
| 545322 | 225 | Exon 2 | ACTTGATCCTGCCAGT | eekddddddddddkke | 36 | 145009 | 22 |
| 545332 | 361 | Exon 4/Intron 3 | CTCGCTCAGGTGAACG | eekddddddddddkke | 57 | 268024 | 22 |
| 545333 | 366 | Exon 4/Intron 3 | AGTCTCTCGCTCAGGT | eekddddddddddkke | 88 | 268029 | 22 |
| 545337 | 444 | Exon 4-intron 4 | CCTTCTGGTATAGAAC | eekddddddddddkke | 21 | 268107 | 22 |
| | | junction | | | | | |
| 545340 | 570 | Exon 5 | GCTAGTTAGCTTGATA | eekddddddddddkke | 39 | 274130 | 22 |
| 545343 | 626 | exon 3-exon 4 | TCTGGTTGCACTATTT | eekddddddddddkke | 34 | n/a | 22 |
| | | junction | | | | | |
| 545344 | 629 | exon 3-exon 4 | GGATCTGGTTGCACTA | eekddddddddddkke | 30 | n/a | 22 |
| | | junction | | | | | |
| 545345 | 632 | Exon 6 | GGTGGATCTGGTTGCA | eekddddddddddkke | 18 | 278926 | 22 |
| 545346 | 638 | Exon 6 | GCAATGGGTGGATCTG | eekddddddddddkke | 50 | 278932 | 22 |
| 545347 | 647 | Exon 6 | CAGTTGAGGGCAATGG | eekddddddddddkke | 71 | 278941 | 22 |
| 545348 | 651 | Exon 6 | AGTCCAGTTGAGGGCA | eekddddddddddkke | 58 | 278945 | 22 |
| 545349 | 655 | Exon 6 | GTAAAGTCCAGTTGAG | eekddddddddddkke | 34 | 278949 | 22 |
| 545350 | 660 | Exon 6 | GTTCAGTAAAGTCCAG | eekddddddddddkke | 52 | 278954 | 22 |
| 545351 | 685 | Exon 6 | CTGCATGAATCCCAGT | eekddddddddddkke | 77 | 278979 | 22 |
| 545355 | 923 | Exon 7 | ACATAGAGCACCTCAC | eekddddddddddkke | 38 | 290421 | 22 |
| 545356 | 926 | Exon 7 | GTTACATAGAGCACCT | eekddddddddddkke | 79 | 290424 | 22 |
| 545357 | 929 | Exon 7 | AGTGTTACATAGAGCA | eekddddddddddkke | 70 | 290427 | 22 |
| 545362 | 1124 | Exon 7-exon 8 | TCCTTGAGGAGATCTG | eekddddddddddkke | 3 | n/a | 22 |
| | | junction | | | | | |
| 545363 | 1170 | Exon 10 | GCTATCATGAATGGCT | eekddddddddddkke | 69 | 297587 | 22 |
| 545364 | 1180 | Exon 10 | CGGGTTTATAGCTATC | eekddddddddddkke | 58 | 297597 | 22 |
| 545369 | 1320 | Exon 10 | ATCCTTCACCCCTAGG | eekddddddddddkke | 46 | 297737 | 22 |
| 545370 | 1328 | Exon 10 | GAGTCGCCATCCTTCA | eekddddddddddkke | 60 | 297745 | 22 |
| 545371 | 1332 | Exon 10 | TCCAGAGTCGCCATCC | eekddddddddddkke | 51 | 297749 | 22 |
| 545373 | 1418 | Exon 10 | GGCTGAGCAACCTCTG | eekddddddddddkke | 80 | 297835 | 22 |
| 545374 | 1422 | Exon 10 | CTGTGGCTGAGCAACC | eekddddddddddkke | 63 | 297839 | 22 |
| 545380 | 1524 | Exon 10 | GATAACACTGGGCTGC | eekddddddddddkke | 60 | 297941 | 22 |
| 545381 | 1530 | Exon 10 | TGCTTGGATAACACTG | eekddddddddddkke | 76 | 297947 | 22 |
| 545382 | 1533 | Exon 10 | CTCTGCTTGGATAACA | eekddddddddddkke | 60 | 297950 | 22 |
| 545386 | 1600 | Exon 10 | GCTGAATATGGGCAGC | eekddddddddddkke | 29 | 298017 | 22 |
| 545387 | 1613 | Exon 10 | CTTGGATTGCTTAGCT | eekddddddddddkke | 59 | 298030 | 22 |
| 545388 | 1645 | Exon 10 | CCTGGGCATAAAAGTC | eekddddddddddkke | 47 | 298062 | 22 |
| 545392 | 1832 | Exon 10 | ACCTTGATGTGAGGAG | eekddddddddddkke | 44 | 298249 | 22 |

TABLE 65
Inhibition of GHR mRNA by deoxy, MOE and cEt gapmers targeting intronic and exonic
regions of SEQ ID NOs: 1 and 2

| | SEQ ID | | | | | SEQ ID | |
|---|---|---|---|---|---|---|---|
| | NO: 1 | | | | | NO: 2 | |
| ISIS | Start | Target | | | % | Start | SEQ ID |
| NO | Site | Region | Sequence | Chemistry | inhibition | Site | NO |
| 541262 | n/a | Intron 2 | TTGGTTTGTCAATCCT | eekddddddddddkke | 89 | 156891 | 1370 |
| 545393 | 1838 | Exon 10 | GATTCAACCTTGATGT | eekddddddddddkke | 40 | 298255 | 2232 |
| 545394 | 1844 | Exon 10 | ATGTGTGATTCAACCT | eekddddddddddkke | 80 | 298261 | 2233 |
| 545395 | 1956 | Exon 10 | TGGGACAGGCATCTCA | eekddddddddddkke | 29 | 298373 | 2234 |
| 545396 | 1961 | Exon 10 | TAGTCTGGGACAGGCA | eekddddddddddkke | 48 | 298378 | 2235 |
| 545397 | 1968 | Exon 10 | GGAGGTATAGTCTGGG | eekddddddddddkke | 61 | 298385 | 2236 |
| 545398 | 1986 | Exon 10 | GGACTGTACTATATGA | eekddddddddddkke | 48 | 298403 | 2237 |
| 545401 | 2077 | Exon 10 | TCAGTTGGTCTGTGCT | eekddddddddddkke | 60 | 298494 | 2238 |
| 545402 | 2095 | Exon 10 | GCTAAGGCATGATTTT | eekddddddddddkke | 53 | 298512 | 2239 |
| 545406 | 2665 | Exon 10 | GCCATGCTTGAAGTCT | eekddddddddddkke | 87 | 299082 | 2240 |
| 545407 | 2668 | Exon 10 | ATAGCCATGCTTGAAG | eekddddddddddkke | 70 | 299085 | 2241 |
| 545408 | 2692 | Exon 10 | ACACAGTGTGTAGTGT | eekddddddddddkke | 60 | 299109 | 2242 |
| 545409 | 2699 | Exon 10 | CTGCAGTACACAGTGT | eekddddddddddkke | 31 | 299116 | 2243 |
| 545410 | 2704 | Exon 10 | ACCAACTGCAGTACAC | eekddddddddddkke | 57 | 299121 | 2244 |
| 545411 | 2739 | Exon 10 | TAGACTGTAGTTGCTA | eekddddddddddkke | 53 | 299156 | 2245 |
| 545412 | 2747 | Exon 10 | ACCAGCTTTAGACTGT | eekddddddddddkke | 56 | 299164 | 2246 |
| 545413 | 2945 | Exon 10 | GTAAGTTGATCTGTGC | eekddddddddddkke | 79 | 299362 | 2247 |
| 545414 | 2963 | Exon 10 | TACTTCTTTTGGTGCC | eekddddddddddkke | 82 | 299380 | 2248 |
| 545416 | 3212 | Exon 10 | TCTTGTACCTTATTCC | eekddddddddddkke | 73 | 299629 | 2249 |
| 545417 | 3306 | Exon 10 | TGGTTATAGGCTGTGA | eekddddddddddkke | 90 | 299723 | 2250 |
| 545418 | 3309 | Exon 10 | GTCTGGTTATAGGCTG | eekddddddddddkke | 88 | 299726 | 2251 |
| 545419 | 3313 | Exon 10 | ATGTGTCTGGTTATAG | eekddddddddddkke | 68 | 299730 | 2252 |
| 545420 | 3317 | Exon 10 | GAGTATGTGTCTGGTT | eekddddddddddkke | 84 | 299734 | 2253 |
| 545421 | 4049 | Exon 10 | GGTCTGCGATAAATGG | eekddddddddddkke | 69 | 300466 | 2254 |
| 545429 | 4424 | Exon 10 | GCCAGACACAACTAGT | eekddddddddddkke | 59 | 300841 | 2255 |
| 545430 | 31 | Exon 1 | ACCGCCACTGTAGCAG | eekddddddddddkke | 76 | 2907 | 2256 |
| 545431 | 36 | Exon 1 | CCGCCACCGCCACTGT | eekddddddddddkke | 94 | 2912 | 2257 |
| 545432 | 103 | Exon 1 | GGGCCTCCGGCCCGCG | eekddddddddddkke | 22 | 2979 | 2258 |
| 545433 | 143 | Exon 1 | AGAGCGCGGGTTCGCG | eekddddddddddkke | 61 | 3019 | 2259 |
| 545434 | n/a | Intron | TACTGACCCCAGTTCC | eekddddddddddkke | 68 | 3654 | 2260 |
| | | 1/Exon 1 | | | | | |
| 545435 | n/a | Intron | ACTCTACTGACCCCAG | eekddddddddddkke | 70 | 3658 | 2261 |
| | | 1/Exon 1 | | | | | |
| 545436 | n/a | Intron | GTCACTCTACTGACCC | eekddddddddddkke | 83 | 3661 | 2262 |
| | | 1/Exon 1 | | | | | |
| 545437 | n/a | Intron | TTCATGCGGACTGGTG | eekddddddddddkke | 68 | 3680 | 2263 |
| | | 1/Exon 1 | | | | | |
| 545438 | n/a | Intron | GTGAGCATGGACCCCA | eekddddddddddkke | 94 | 225436 | 2264 |
| | | 3/Exon 3 | | | | | |
| 545439 | n/a | Intron | TGATATGTGAGCATGG | eekddddddddddkke | 88 | 225442 | 2265 |
| | | 3/Exon 3 | | | | | |
| 545440 | n/a | Intron | AAGTTGGTGAGCTTCT | eekddddddddddkke | 85 | 226785 | 2266 |
| | | 3/Exon 3 | | | | | |
| 545441 | n/a | Intron | CCTTCAAGTTGGTGAG | eekddddddddddkke | 88 | 226790 | 2267 |
| | | 3/Exon 3 | | | | | |
| 545442 | n/a | Intron | GTAAGATCCTTTTGCC | eekddddddddddkke | 70 | 226883 | 2268 |
| | | 3/Exon 3 | | | | | |
| 545443 | n/a | Intron | CAGCTGTGCAACTTGC | eekddddddddddkke | 50 | 238345 | 2269 |
| | | 3/Exon 3 | | | | | |
| 545444 | n/a | Intron | GCCTTGGTAGGTAGGG | eekddddddddddkke | 68 | 238422 | 2270 |
| | | 3/Exon 3 | | | | | |
| 545445 | n/a | Intron | AGAGCCTTGGTAGGTA | eekddddddddddkke | 85 | 238425 | 2271 |
| | | 3/Exon 3 | | | | | |
| 545446 | n/a | Intron | CCCGCACAAACGCGCA | eekddddddddddkke | 10 | 3614 | 2272 |
| | | 1/Exon 1 | | | | | |
| 545447 | n/a | Intron | GTCTTCAAGGTCAGTT | eekddddddddddkke | 92 | 93208 | 2273 |
| | | 1/Exon 1 | | | | | |
| 545448 | n/a | Intron | GCCCAGTGAATTCAGC | eekddddddddddkke | 76 | 93246 | 2274 |
| | | 1/Exon 1 | | | | | |
| 545449 | n/a | Intron | AGATGCGCCCAGTGAA | eekddddddddddkke | 60 | 93252 | 2275 |
| | | 1/Exon 1 | | | | | |
| 545450 | n/a | Intron | GTAAGATGCGCCCAGT | eekddddddddddkke | 78 | 93255 | 2276 |
| | | 1/Exon 1 | | | | | |
| 545451 | n/a | Intron | CCAGAAGGCACTTGTA | eekddddddddddkke | 42 | 93301 | 2277 |
| | | 1/Exon 1 | | | | | |
| 545452 | n/a | Intron | GGAAGATTTGCAGAAC | eekddddddddddkke | 15 | 93340 | 2278 |
| | | 1/Exon 1 | | | | | |
| 545453 | n/a | Intron | CCTTGGTCATGGAAGA | eekddddddddddkke | 35 | 93350 | 2279 |
| | | 1/Exon 1 | | | | | |
| 545454 | n/a | Intron | TGACCTTGGTCATGGA | eekddddddddddkke | 55 | 93353 | 2280 |
| | | 1/Exon 1 | | | | | |
| 545455 | n/a | Intron | GAGGTGACCTTGGTCA | eekddddddddddkke | 70 | 93357 | 2281 |
| | | 1/Exon 1 | | | | | |
| 545456 | n/a | Intron | ATCCAAAGAGGTGACC | eekddddddddddkke | 41 | 93364 | 2282 |
| | | 1/Exon 1 | | | | | |
| 545457 | n/a | Intron | GCCAATCCAAAGAGGT | eekddddddddddkke | 56 | 93368 | 2283 |
| | | 1/Exon 1 | | | | | |
| 545458 | n/a | Intron | GGTCTGCCAATCCAAA | eekddddddddddkke | 79 | 93373 | 2284 |
| | | 1/Exon 1 | | | | | |
| 545459 | n/a | Intron | CCCTGGGTCTGCCAAT | eekddddddddddkke | 68 | 93378 | 2285 |
| | | 1/Exon 1 | | | | | |
| 545460 | n/a | Intron | GAGATCTCAACAAGGG | eekddddddddddkke | 52 | 93427 | 2286 |
| | | 1/Exon 1 | | | | | |
| 545461 | n/a | Intron | CGCCCATCACTCTTCC | eekddddddddddkke | 68 | 93988 | 2287 |
| | | 1/Exon 1 | | | | | |
| 545462 | n/a | Intron | CACCTGTCGCCCATCA | eekddddddddddkke | 67 | 93995 | 2288 |
| | | 1/Exon 1 | | | | | |
| 545463 | n/a | Intron | CATCACCTGTCGCCCA | eekddddddddddkke | 78 | 93998 | 2289 |
| | | 1/Exon 1 | | | | | |
| 545464 | n/a | Intron | CACCATCACCTGTCGC | eekddddddddddkke | 74 | 94001 | 2290 |
| | | 1/Exon 1 | | | | | |
| 545465 | n/a | Intron | AATAGTTGTCACCATC | eekddddddddddkke | 76 | 94010 | 2291 |
| | | 1/Exon 1 | | | | | |
| 545466 | n/a | Intron | GCCACCTTTCATGAGA | eekddddddddddkke | 58 | 94048 | 2292 |
| | | 1/Exon 1 | | | | | |
| 545467 | n/a | Intron | CTCTTGGAAGTAGGTA | eekddddddddddkke | 89 | 198762 | 2293 |
| | | 2/Exon 2 | | | | | |
| 545468 | n/a | Intron | GTTCTCTTGGAAGTAG | eekddddddddddkke | 80 | 198765 | 2294 |
| | | 2/Exon 2 | | | | | |
| 545469 | n/a | Intron | TAAACAGGTTGGTCTG | eekddddddddddkke | 68 | 198854 | 2295 |
| | | 2/Exon 2 | | | | | |

### Example 8

### Dose-Dependent Antisense Inhibition of Human GHR in Hep3B Cells by Deoxy, MOE and cEt Gapmers

[0405] Gapmers from studies described above exhibiting significant in vitro inhibition of GHR mRNA were selected and tested at various doses in Hep3B cells. The antisense oligonucleotides were tested in a series of experiments that had similar culture conditions. The results for each experiment are presented in separate tables shown below. Cells were plated at a density of 20,000 cells per well and transfected using electroporation with 0.625 μM, 1.25 μM, 2.50 μM, 5.00 μM and 10.00 μM concentrations of antisense oligonucleotide. After a treatment period of approximately 16 hours, RNA was isolated from the cells and GHR mRNA levels were measured by quantitative real-time PCR. Human primer probe set RTS3437_MGB was used to measure mRNA levels. GHR mRNA levels were adjusted according to total RNA content, as measured by RIBOGREEN®. Results are presented as percent inhibition of GHR, relative to untreated control cells.

[0406] The half maximal inhibitory concentration (IC₅₀) of each oligonucleotide is also presented. GHR mRNA levels were significantly reduced in a dose-dependent manner in antisense oligonucleotide treated cells.

TABLE 66

| | 0.625 | 1.250 | 2.50 | 5.00 | 10.00 | IC₅₀ |
|---|---|---|---|---|---|---|
| ISIS No | μM | μM | μM | μM | μM | (μM) |
| 541396 | 30 | 51 | 68 | 74 | 67 | 1.4 |
| 541262 | 55 | 87 | 90 | 94 | 97 | 0.2 |
| 541393 | 30 | 38 | 52 | 66 | 81 | 2.1 |
| 541375 | 41 | 45 | 54 | 64 | 79 | 1.6 |
| 541438 | 44 | 49 | 75 | 80 | 91 | 0.9 |
| 541428 | 35 | 32 | 56 | 78 | 88 | 1.8 |
| 541491 | 13 | 46 | 67 | 55 | 95 | 2.0 |
| 541435 | 21 | 46 | 55 | 72 | 94 | 1.9 |
| 541471 | 11 | 49 | 50 | 77 | 89 | 2.0 |
| 541430 | 24 | 44 | 56 | 57 | 79 | 2.2 |
| 541492 | 32 | 40 | 65 | 80 | 85 | 1.5 |
| 541431 | 22 | 46 | 73 | 84 | 92 | 1.5 |

TABLE 67

| | 0.625 | 1.250 | 2.50 | 5.00 | 10.00 | IC₅₀ |
|---|---|---|---|---|---|---|
| ISIS No | μM | μM | μM | μM | μM | (μM) |
| 541487 | 36 | 46 | 66 | 85 | 92 | 1.3 |
| 541423 | 33 | 55 | 64 | 80 | 93 | 1.2 |
| 541452 | 37 | 60 | 79 | 87 | 94 | 0.9 |
| 541505 | 51 | 75 | 86 | 92 | 97 | 0.4 |
| 541522 | 54 | 76 | 81 | 90 | 95 | 0.3 |
| 541539 | 65 | 76 | 85 | 94 | 98 | 0.2 |
| 541503 | 54 | 65 | 80 | 93 | 97 | 0.5 |
| 541520 | 43 | 61 | 86 | 94 | 96 | 0.7 |
| 541515 | 57 | 72 | 85 | 92 | 94 | 0.3 |
| 541564 | 57 | 72 | 88 | 90 | 97 | 0.3 |
| 541554 | 43 | 65 | 81 | 89 | 93 | 0.7 |
| 541509 | 11 | 8 | 19 | 6 | 8 | >10 |
| 541584 | 59 | 65 | 84 | 91 | 96 | 0.3 |
| 541585 | 70 | 80 | 93 | 92 | 98 | 0.1 |

TABLE 68

| | 0.625 | 1.250 | 2.50 | 5.00 | 10.00 | IC₅₀ |
|---|---|---|---|---|---|---|
| ISIS No | μM | μM | μM | μM | μM | (μM) |
| 541598 | 26 | 43 | 75 | 80 | 76 | 1.5 |
| 541592 | 35 | 48 | 67 | 85 | 95 | 1.2 |
| 541641 | 22 | 63 | 70 | 91 | 93 | 1.2 |
| 541590 | 27 | 59 | 70 | 94 | 95 | 1.2 |
| 541615 | 40 | 65 | 84 | 88 | 94 | 0.7 |
| 541595 | 35 | 57 | 73 | 84 | 95 | 1.0 |
| 541575 | 49 | 60 | 79 | 84 | 95 | 0.6 |
| 541571 | 41 | 50 | 76 | 80 | 94 | 1.0 |
| 541582 | 0 | 10 | 25 | 50 | 82 | 4.4 |
| 541262 | 66 | 79 | 93 | 94 | 99 | <0.6 |
| 541652 | 1 | 44 | 80 | 82 | 87 | 1.9 |
| 541670 | 29 | 40 | 63 | 79 | 89 | 1.6 |
| 541662 | 17 | 13 | 45 | 62 | 84 | 3.1 |
| 541724 | 37 | 47 | 72 | 85 | 95 | 1.2 |

TABLE 69

| | 0.625 | 1.250 | 2.50 | 5.00 | 10.00 | IC₅₀ |
|---|---|---|---|---|---|---|
| ISIS No | μM | μM | μM | μM | μM | (μM) |
| 541748 | 86 | 94 | 96 | 98 | 98 | <0.6 |
| 541767 | 83 | 91 | 95 | 96 | 98 | <0.6 |
| 541797 | 78 | 89 | 93 | 97 | 99 | <0.6 |
| 541766 | 59 | 82 | 92 | 97 | 99 | <0.6 |
| 541742 | 65 | 87 | 93 | 95 | 99 | <0.6 |
| 541750 | 80 | 86 | 96 | 96 | 99 | <0.6 |
| 541262 | 79 | 88 | 93 | 97 | 97 | <0.6 |
| 541749 | 71 | 84 | 93 | 95 | 98 | <0.6 |
| 541793 | 71 | 88 | 94 | 97 | 98 | <0.6 |
| 541785 | 56 | 79 | 89 | 93 | 98 | <0.6 |
| 541746 | 34 | 61 | 85 | 94 | 97 | 0.9 |
| 541752 | 49 | 72 | 88 | 93 | 93 | <0.6 |
| 541826 | 86 | 94 | 95 | 99 | 98 | <0.6 |
| 541811 | 66 | 87 | 93 | 97 | 98 | <0.6 |

TABLE 70

| | 0.625 | 1.250 | 2.50 | 5.00 | 10.00 | IC₅₀ |
|---|---|---|---|---|---|---|
| ISIS No | μM | μM | μM | μM | μM | (μM) |
| 541822 | 83 | 88 | 95 | 96 | 96 | <0.6 |
| 541870 | 77 | 87 | 95 | 97 | 98 | <0.6 |
| 541262 | 85 | 93 | 96 | 97 | 98 | <0.6 |
| 541873 | 32 | 77 | 93 | 94 | 97 | 0.7 |
| 541819 | 60 | 91 | 97 | 97 | 99 | <0.6 |
| 541841 | 86 | 91 | 95 | 96 | 97 | <0.6 |
| 541825 | 78 | 88 | 95 | 98 | 98 | <0.6 |
| 541863 | 63 | 77 | 87 | 93 | 97 | <0.6 |
| 541827 | 42 | 80 | 87 | 94 | 97 | <0.6 |
| 541875 | 77 | 84 | 93 | 96 | 97 | <0.6 |
| 541835 | 56 | 73 | 90 | 95 | 98 | <0.6 |
| 541838 | 72 | 90 | 93 | 98 | 97 | <0.6 |
| 541833 | 52 | 69 | 83 | 92 | 97 | <0.6 |
| 541813 | 47 | 75 | 86 | 95 | 97 | <0.6 |

TABLE 71

| | 0.625 | 1.250 | 2.50 | 5.00 | 10.00 | IC₅₀ |
|---|---|---|---|---|---|---|
| ISIS No | μM | μM | μM | μM | μM | (μM) |
| 541853 | 74 | 79 | 88 | 93 | 91 | <0.6 |
| 541842 | 69 | 85 | 91 | 97 | 99 | <0.6 |
| 541877 | 79 | 91 | 93 | 98 | 97 | <0.6 |
| 541848 | 58 | 90 | 96 | 98 | 98 | 0.7 |
| 541804 | 23 | 81 | 89 | 95 | 95 | 0.8 |
| 541881 | 87 | 94 | 98 | 98 | 99 | <0.6 |
| 541936 | 91 | 96 | 98 | 99 | 98 | <0.6 |
| 541909 | 56 | 80 | 89 | 95 | 97 | <0.6 |
| 541907 | 75 | 91 | 95 | 97 | 98 | <0.6 |
| 541952 | 68 | 81 | 93 | 97 | 98 | <0.6 |
| 541953 | 68 | 80 | 94 | 97 | 98 | <0.6 |
| 541914 | 60 | 78 | 94 | 97 | 97 | <0.6 |
| 541880 | 56 | 74 | 89 | 94 | 95 | <0.6 |
| 541903 | 37 | 74 | 87 | 96 | 98 | 0.6 |

TABLE 72

| | 0.625 | 1.250 | 2.50 | 5.00 | 10.00 | IC₅₀ |
|---|---|---|---|---|---|---|
| ISIS No | μM | μM | μM | μM | μM | (μM) |
| 541895 | 47 | 72 | 85 | 93 | 94 | <0.6 |
| 541882 | 60 | 67 | 89 | 93 | 97 | <0.6 |
| 541889 | 63 | 80 | 87 | 94 | 97 | <0.6 |
| 541904 | 26 | 78 | 23 | 89 | 93 | 1.4 |
| 545418 | 0 | 81 | 91 | 94 | 95 | 1.7 |
| 541930 | 58 | 71 | 82 | 88 | 92 | <0.6 |
| 545439 | 67 | 87 | 93 | 96 | 98 | <0.6 |
| 542024 | 15 | 58 | 78 | 87 | 90 | 1.4 |
| 541985 | 59 | 81 | 88 | 93 | 97 | <0.6 |
| 541972 | 47 | 58 | 83 | 90 | 92 | 0.6 |
| 541991 | 57 | 64 | 88 | 92 | 83 | <0.6 |
| 541980 | 33 | 50 | 76 | 72 | 93 | 1.2 |

TABLE 73

| | 0.625 | 1.250 | 2.50 | 5.00 | 10.00 | IC₅₀ |
|---|---|---|---|---|---|---|
| ISIS No | μM | μM | μM | μM | μM | (μM) |
| 541264 | 26 | 44 | 64 | 79 | 89 | 1.6 |
| 541265 | 29 | 32 | 62 | 79 | 91 | 1.8 |
| 541263 | 25 | 40 | 62 | 78 | 93 | 1.7 |
| 541268 | 57 | 73 | 85 | 90 | 95 | 0.3 |
| 541266 | 15 | 33 | 46 | 66 | 90 | 2.5 |
| 542107 | 93 | 97 | 98 | 98 | 98 | <0.6 |
| 542052 | 93 | 96 | 97 | 96 | 98 | <0.6 |
| 542105 | 80 | 92 | 96 | 98 | 97 | <0.6 |
| 542102 | 94 | 96 | 96 | 97 | 98 | <0.6 |
| 542108 | 90 | 92 | 94 | 97 | 99 | <0.6 |
| 542080 | 87 | 93 | 95 | 95 | 97 | <0.6 |

TABLE 74

| | 0.625 | 1.250 | 2.50 | 5.00 | 10.00 | IC₅₀ |
|---|---|---|---|---|---|---|
| ISIS No | μM | μM | μM | μM | μM | (μM) |
| 542101 | 90 | 97 | 97 | 97 | 95 | <0.6 |
| 542051 | 89 | 96 | 95 | 98 | 97 | <0.6 |
| 542106 | 83 | 93 | 96 | 96 | 98 | <0.6 |
| 542071 | 84 | 91 | 94 | 97 | 97 | <0.6 |
| 542094 | 85 | 92 | 94 | 97 | 98 | <0.6 |
| 542069 | 89 | 94 | 97 | 95 | 98 | <0.6 |
| 542086 | 83 | 94 | 96 | 97 | 98 | <0.6 |
| 542085 | 85 | 92 | 96 | 97 | 97 | <0.6 |
| 542053 | 64 | 83 | 94 | 98 | 97 | <0.6 |
| 542087 | 69 | 84 | 99 | 95 | 98 | <0.6 |
| 542109 | 87 | 94 | 96 | 98 | 98 | <0.6 |
| 542126 | 96 | 98 | 99 | 98 | 98 | <0.6 |
| 542127 | 94 | 96 | 97 | 98 | 97 | <0.6 |
| 542128 | 90 | 96 | 98 | 98 | 97 | <0.6 |

TABLE 75

| | 0.625 | 1.250 | 2.50 | 5.00 | 10.00 | IC₅₀ |
|---|---|---|---|---|---|---|
| ISIS No | μM | μM | μM | μM | μM | (μM) |
| 542118 | 97 | 97 | 98 | 95 | 43 | <0.6 |
| 542186 | 93 | 96 | 98 | 99 | 98 | <0.6 |
| 542150 | 95 | 97 | 98 | 99 | 99 | <0.6 |
| 542122 | 90 | 94 | 98 | 98 | 99 | <0.6 |
| 542125 | 88 | 97 | 98 | 98 | 99 | <0.6 |
| 542145 | 90 | 96 | 98 | 99 | 99 | <0.6 |
| 542112 | 86 | 94 | 99 | 99 | 99 | <0.6 |
| 542149 | 88 | 93 | 99 | 98 | 99 | <0.6 |
| 542146 | 79 | 93 | 96 | 97 | 98 | <0.6 |
| 542153 | 87 | 94 | 97 | 98 | 99 | <0.6 |
| 542119 | 64 | 84 | 93 | 97 | 98 | <0.6 |
| 542137 | 76 | 91 | 97 | 97 | 98 | <0.6 |
| 542152 | 84 | 94 | 96 | 96 | 97 | <0.6 |
| 542157 | 83 | 95 | 98 | 99 | 98 | <0.6 |

TABLE 76

| | 0.625 | 1.250 | 2.50 | 5.00 | 10.00 | IC₅₀ |
|---|---|---|---|---|---|---|
| ISIS No | μM | μM | μM | μM | μM | (μM) |
| 542185 | 82 | 93 | 96 | 96 | 94 | <0.6 |
| 542143 | 81 | 91 | 96 | 98 | 98 | <0.6 |
| 542144 | 77 | 93 | 95 | 96 | 99 | <0.6 |
| 542139 | 87 | 93 | 98 | 98 | 98 | <0.6 |
| 542134 | 83 | 90 | 90 | 95 | 96 | <0.6 |
| 545333 | 68 | 85 | 91 | 96 | 98 | <0.6 |
| 545373 | 57 | 73 | 86 | 92 | 97 | <0.6 |
| 545438 | 84 | 96 | 98 | 97 | 99 | <0.6 |
| 545431 | 77 | 91 | 93 | 97 | 98 | <0.6 |
| 545447 | 70 | 85 | 96 | 96 | 97 | <0.6 |
| 545417 | 62 | 82 | 90 | 93 | 95 | <0.6 |
| 545467 | 77 | 88 | 91 | 94 | 95 | <0.6 |
| 545441 | 63 | 82 | 92 | 94 | 96 | <0.6 |

### Example 9

### Dose-Dependent Antisense Inhibition of Human GHR in Hep3B Cells by Deoxy, MOE and cEt Gapmers

[0407] Gapmers from studies described above exhibiting significant in vitro inhibition of GHR mRNA were selected and tested at various doses in Hep3B cells. The antisense oligonucleotides were tested in a series of experiments that had similar culture conditions. The results for each experiment are presented in separate tables shown below. Cells were plated at a density of 20,000 cells per well and transfected using electroporation with 0.04 μM, 0.11 μM, 0.33 μM, 1.00 μM, and 3.00 μM concentrations of antisense oligonucleotide. After a treatment period of approximately 16 hours, RNA was isolated from the cells and GHR mRNA levels were measured by quantitative real-time PCR. Human primer probe set RTS3437_MGB was used to measure mRNA levels. GHR mRNA levels were adjusted according to total RNA content, as measured by RIBOGREEN®. Results are presented as percent inhibition of GHR, relative to untreated control cells.

[0408] The half maximal inhibitory concentration (IC₅₀) of each oligonucleotide is also presented. GHR mRNA levels were significantly reduced in a dose-dependent manner in antisense oligonucleotide treated cells.

TABLE 77

| | | | | | 3.00 | IC₅₀ |
|---|---|---|---|---|---|---|
| ISIS No | 0.04 μM | 0.11 μM | 0.33 μM | 1.00 μM | μM | (μM) |
| 539380 | 11 | 16 | 57 | 93 | 98 | 0.2 |
| 541724 | 0 | 27 | 71 | 66 | 83 | 0.3 |
| 541748 | 28 | 40 | 71 | 90 | 97 | 0.1 |
| 541767 | 19 | 38 | 54 | 87 | 98 | 0.2 |
| 541797 | 23 | 46 | 70 | 88 | 97 | 0.1 |
| 541766 | 15 | 26 | 49 | 82 | 96 | 0.3 |
| 541742 | 17 | 28 | 41 | 80 | 95 | 0.3 |
| 541750 | 33 | 27 | 60 | 89 | 98 | 0.2 |
| 541749 | 27 | 16 | 62 | 84 | 82 | 0.2 |
| 541793 | 0 | 14 | 44 | 77 | 96 | 0.4 |
| 541785 | 4 | 11 | 39 | 75 | 95 | 0.4 |
| 541752 | 14 | 6 | 45 | 70 | 94 | 0.4 |
| 541826 | 8 | 34 | 74 | 94 | 99 | 0.2 |
| 541811 | 6 | 4 | 45 | 79 | 97 | 0.4 |
| 541822 | 9 | 29 | 67 | 89 | 97 | 0.2 |

TABLE 78

| | | | | | 3.00 | IC₅₀ |
|---|---|---|---|---|---|---|
| ISIS No | 0.04 μM | 0.11 μM | 0.33 μM | 1.00 μM | μM | (μM) |
| 539380 | 0 | 16 | 47 | 82 | 98 | 0.4 |
| 541819 | 3 | 12 | 50 | 76 | 94 | 0.3 |
| 541841 | 0 | 19 | 47 | 80 | 95 | 0.3 |
| 541825 | 0 | 6 | 40 | 74 | 96 | 0.4 |
| 541827 | 5 | 26 | 48 | 76 | 95 | 0.3 |
| 541835 | 7 | 11 | 33 | 74 | 93 | 0.4 |
| 541838 | 21 | 26 | 61 | 90 | 97 | 0.2 |
| 541833 | 0 | 9 | 41 | 63 | 89 | 0.5 |
| 541813 | 0 | 17 | 28 | 65 | 92 | 0.5 |
| 541842 | 5 | 15 | 30 | 72 | 90 | 0.4 |
| 541804 | 0 | 12 | 3 | 49 | 79 | 1.1 |
| 542024 | 0 | 0 | 26 | 54 | 76 | 1.0 |
| 542107 | 15 | 45 | 78 | 92 | 99 | 0.1 |
| 542105 | 2 | 14 | 55 | 88 | 98 | 0.3 |
| 542102 | 10 | 16 | 73 | 88 | 98 | 0.2 |

TABLE 79

| | | | | | 3.00 | IC₅₀ |
|---|---|---|---|---|---|---|
| ISIS No | 0.04 μM | 0.11 μM | 0.33 μM | 1.00 μM | μM | (μM) |
| 539380 | 4 | 18 | 50 | 86 | 95 | 0.3 |
| 542108 | 15 | 13 | 65 | 86 | 97 | 0.2 |
| 542101 | 17 | 40 | 68 | 92 | 98 | 0.2 |
| 542106 | 4 | 23 | 56 | 88 | 98 | 0.3 |
| 542094 | 0 | 30 | 51 | 86 | 96 | 0.3 |
| 542086 | 13 | 38 | 50 | 84 | 97 | 0.2 |
| 542085 | 0 | 27 | 57 | 90 | 98 | 0.3 |
| 542087 | 7 | 3 | 49 | 80 | 92 | 0.4 |
| 542109 | 17 | 10 | 56 | 88 | 98 | 0.3 |
| 542126 | 40 | 63 | 91 | 96 | 99 | <0.03 |
| 542127 | 27 | 47 | 69 | 93 | 97 | 0.1 |
| 542128 | 11 | 30 | 66 | 90 | 98 | 0.2 |
| 542118 | 14 | 42 | 77 | 95 | 98 | 0.1 |
| 542150 | 31 | 46 | 72 | 94 | 98 | 0.1 |
| 542122 | 13 | 14 | 59 | 90 | 97 | 0.3 |

TABLE 80

| | | | | | 3.00 | IC₅₀ |
|---|---|---|---|---|---|---|
| ISIS No | 0.04 μM | 0.11 μM | 0.33 μM | 1.00 μM | μM | (μM) |
| 539380 | 0 | 2 | 50 | 86 | 97 | 0.4 |
| 542125 | 31 | 32 | 69 | 89 | 96 | 0.1 |
| 542145 | 15 | 29 | 64 | 91 | 97 | 0.2 |
| 542112 | 14 | 38 | 61 | 87 | 96 | 0.2 |
| 542149 | 9 | 37 | 63 | 90 | 97 | 0.2 |
| 542146 | 13 | 33 | 59 | 82 | 95 | 0.2 |
| 542153 | 22 | 26 | 63 | 86 | 96 | 0.2 |
| 542119 | 10 | 20 | 34 | 70 | 87 | 0.4 |
| 542137 | 3 | 19 | 47 | 77 | 95 | 0.3 |
| 542152 | 0 | 9 | 47 | 82 | 96 | 0.4 |
| 542157 | 0 | 26 | 56 | 84 | 96 | 0.3 |
| 542143 | 8 | 12 | 44 | 81 | 95 | 0.3 |
| 542144 | 0 | 21 | 42 | 75 | 95 | 0.4 |
| 542139 | 0 | 14 | 46 | 82 | 97 | 0.4 |
| 542134 | 3 | 23 | 43 | 72 | 92 | 0.4 |

TABLE 81

| | | | | | 3.00 | IC₅₀ |
|---|---|---|---|---|---|---|
| ISIS No | 0.04 μM | 0.11 μM | 0.33 μM | 1.00 μM | μM | (μM) |
| 539380 | 0 | 9 | 64 | 85 | 97 | 0.3 |
| 541870 | 7 | 15 | 48 | 80 | 92 | 0.3 |
| 541262 | 0 | 29 | 63 | 90 | 98 | 0.2 |
| 541863 | 0 | 26 | 40 | 82 | 93 | 0.4 |
| 541875 | 6 | 30 | 71 | 84 | 91 | 0.2 |
| 541853 | 0 | 13 | 39 | 67 | 91 | 0.5 |
| 541877 | 0 | 26 | 41 | 79 | 94 | 0.4 |
| 541881 | 0 | 30 | 54 | 87 | 94 | 0.3 |
| 541936 | 20 | 41 | 73 | 93 | 98 | 0.1 |
| 541909 | 0 | 16 | 34 | 64 | 90 | 0.5 |
| 541907 | 6 | 31 | 59 | 84 | 96 | 0.2 |
| 541952 | 0 | 0 | 50 | 72 | 92 | 0.5 |
| 541953 | 0 | 22 | 50 | 80 | 92 | 0.4 |
| 541914 | 0 | 0 | 46 | 76 | 93 | 0.4 |
| 541880 | 0 | 13 | 48 | 79 | 89 | 0.4 |

TABLE 82

| | | | | | 3.00 | IC₅₀ |
|---|---|---|---|---|---|---|
| ISIS No | 0.04 μM | 0.11 μM | 0.33 μM | 1.00 μM | μM | (μM) |
| 539380 | 0 | 5 | 53 | 78 | 94 | 0.4 |
| 541903 | 12 | 20 | 26 | 62 | 88 | 0.5 |
| 541895 | 3 | 12 | 29 | 66 | 92 | 0.5 |
| 541882 | 2 | 0 | 27 | 65 | 86 | 0.7 |
| 541889 | 12 | 12 | 47 | 68 | 87 | 0.4 |
| 541930 | 0 | 6 | 40 | 59 | 85 | 0.6 |
| 541985 | 0 | 16 | 41 | 66 | 93 | 0.4 |
| 542031 | 1 | 0 | 22 | 55 | 80 | 0.8 |
| 541972 | 0 | 1 | 23 | 46 | 83 | 0.9 |
| 541991 | 4 | 35 | 42 | 67 | 89 | 0.4 |
| 542052 | 5 | 28 | 70 | 92 | 98 | 0.2 |
| 542080 | 0 | 18 | 54 | 87 | 96 | 0.3 |
| 542051 | 0 | 18 | 52 | 86 | 97 | 0.3 |
| 542071 | 5 | 3 | 51 | 74 | 95 | 0.4 |
| 542069 | 0 | 7 | 56 | 85 | 94 | 0.3 |

TABLE 83

| | | | | | 3.00 | IC₅₀ |
|---|---|---|---|---|---|---|
| ISIS No | 0.04 μM | 0.11 μM | 0.33 μM | 1.00 μM | μM | (μM) |
| 539380 | 11 | 20 | 54 | 89 | 92 | 0.3 |
| 542053 | 6 | 14 | 38 | 69 | 74 | 0.6 |
| 542186 | 14 | 43 | 70 | 90 | 98 | 0.2 |
| 542185 | 0 | 26 | 48 | 80 | 96 | 0.3 |
| 545333 | 0 | 4 | 27 | 65 | 90 | 0.6 |
| 545336 | 0 | 15 | 24 | 43 | 79 | 0.9 |
| 545373 | 0 | 2 | 9 | 42 | 86 | 1.0 |
| 545438 | 0 | 24 | 56 | 81 | 92 | 0.3 |
| 545431 | 0 | 18 | 50 | 73 | 91 | 0.4 |
| 545447 | 0 | 15 | 34 | 78 | 93 | 0.4 |
| 545417 | 0 | 11 | 39 | 66 | 87 | 0.5 |
| 545467 | 12 | 16 | 37 | 76 | 93 | 0.4 |
| 545441 | 21 | 15 | 20 | 60 | 87 | 0.6 |
| 545439 | 17 | 24 | 49 | 82 | 91 | 0.3 |

### Example 10

### Dose-Dependent Antisense Inhibition of Rhesus Monkey GHR in LLC-MK2 Cells

[0409] Gapmers from studies described above exhibiting significant in vitro inhibition of GHR mRNA were selected and tested for their potency for rhesus GHR mRNA in LLC-MK2 cells. Cells were plated at a density of 20,000 cells per well and transfected using electroporation with 0.12 μM, 0.37 μM, 1.11 μM, 3.33 μM, and 10.00 μM concentrations of antisense oligonucleotide. After a treatment period of approximately 16 hours, RNA was isolated from the cells and GHR mRNA levels were measured by quantitative real-time PCR. Primer probe set RTS3437_MGB was used to measure mRNA levels. GHR mRNA levels were adjusted according to total RNA content, as measured by RIBOGREEN®. Results are presented as percent inhibition of GHR, relative to untreated control cells.

[0410] The half maximal inhibitory concentration (IC₅₀) of each oligonucleotide is also presented. GHR mRNA levels were significantly reduced in a dose-dependent manner in antisense oligonucleotide treated cells.

TABLE 84

| ISIS | | 0.12 | 0.37 | 1.11 | 3.33 | 10.00 | IC₅₀ |
|---|---|---|---|---|---|---|---|
| No | Chemistry | μM | μM | μM | μM | μM | (μM) |
| 541262 | Deoxy, MOE and | 9 | 25 | 42 | 85 | 91 | 1.1 |
| | cEt | | | | | | |
| 541742 | Deoxy, MOE and | 0 | 24 | 19 | 58 | 77 | 3.2 |
| | cEt | | | | | | |
| 541767 | Deoxy, MOE and | 6 | 10 | 30 | 68 | 88 | 2.0 |
| | cEt | | | | | | |
| 541875 | Deoxy, MOE and | 7 | 19 | 64 | 84 | 96 | 0.9 |
| | cEt | | | | | | |
| 541881 | Deoxy, MOE and | 6 | 24 | 59 | 79 | 91 | 1.0 |
| | cEt | | | | | | |
| 542101 | Deoxy, MOE and | 0 | 5 | 38 | 71 | 81 | 2.0 |
| | cEt | | | | | | |
| 542112 | Deoxy, MOE and | 5 | 17 | 33 | 67 | 76 | 2.0 |
| | cEt | | | | | | |
| 542118 | Deoxy, MOE and | 1 | 6 | 35 | 68 | 86 | 2.0 |
| | cEt | | | | | | |
| 542125 | Deoxy, MOE and | 0 | 12 | 57 | 83 | 93 | 1.0 |
| | cEt | | | | | | |
| 542127 | Deoxy, MOE and | 1 | 0 | 30 | 68 | 84 | 2.4 |
| | cEt | | | | | | |
| 542128 | Deoxy, MOE and | 12 | 0 | 26 | 58 | 83 | 2.7 |
| | cEt | | | | | | |
| 542153 | Deoxy, MOE and | 4 | 0 | 0 | 36 | 59 | 6.6 |
| | cEt | | | | | | |
| 542185 | Deoxy, MOE and | 4 | 0 | 25 | 56 | 87 | 2.5 |
| | cEt | | | | | | |
| 542186 | Deoxy, MOE and | 15 | 23 | 51 | 73 | 90 | 1.1 |
| | cEt | | | | | | |
| 542051 | Deoxy, MOE and | 5 | 19 | 40 | 81 | 94 | 1.2 |
| | cEt | | | | | | |

TABLE 85

| | | | 0.37 | 1.11 | 3.33 | 10.00 | IC₅₀ |
|---|---|---|---|---|---|---|---|
| ISIS No | Chemistry | 0.12 μM | μM | μM | μM | μM | (μM) |
| 523723 | 5-10-5 MOE | 23 | 14 | 31 | 43 | 71 | 3.5 |
| 532254 | 5-10-5 MOE | 29 | 35 | 42 | 69 | 87 | 0.8 |
| 532401 | 5-10-5 MOE | 27 | 28 | 46 | 73 | 88 | 1.2 |
| 533932 | 5-10-5 MOE | 10 | 24 | 48 | 70 | 92 | 1.2 |
| 539376 | 3-10-4 MOE | 21 | 8 | 8 | 35 | 81 | 4.3 |
| 539399 | 3-10-4 MOE | 2 | 10 | 14 | 18 | 57 | 8.3 |
| 539404 | 3-10-4 MOE | 39 | 12 | 25 | 27 | 57 | 7.7 |
| 539416 | 3-10-4 MOE | 24 | 35 | 44 | 79 | 89 | 1.0 |
| 539432 | 3-10-4 MOE | 9 | 29 | 42 | 73 | 89 | 1.2 |
| 541262 | Deoxy, MOE | 0 | 43 | 63 | 88 | 94 | 0.8 |
| | and cEt | | | | | | |
| 541742 | Deoxy, MOE | 3 | 19 | 35 | 56 | 85 | 1.9 |
| | and cEt | | | | | | |
| 541767 | Deoxy, MOE | 3 | 24 | 39 | 64 | 86 | 1.6 |
| | and cEt | | | | | | |
| 545439 | Deoxy, MOE | 19 | 15 | 43 | 74 | 80 | 1.7 |
| | and cEt | | | | | | |
| 545447 | Deoxy, MOE | 25 | 34 | 58 | 80 | 90 | 0.6 |
| | and cEt | | | | | | |

### Example 11

### Dose-Dependent Antisense Inhibition of GHR in Cynomolgus Primary Hepatocytes

[0411] Gapmers from studies described above exhibiting significant in vitro inhibition of GHR mRNA were selected and tested for their potency for GHR mRNA in cynomolgus monkey primary hepatocytes. Cells were plated at a density of 20,000 cells per well and transfected using electroporation with 0.12 μM, 0.37 μM, 1.11 μM, 3.33 μM, and 10.00 μM concentrations of antisense oligonucleotide. After a treatment period of approximately 16 hours, RNA was isolated from the cells and GHR mRNA levels were measured by quantitative real-time PCR. Primer probe set RTS3437_MGB was used to measure mRNA levels. GHR mRNA levels were adjusted according to total RNA content, as measured by RIBOGREEN®. Results are presented as percent inhibition of GHR, relative to untreated control cells.

[0412] The half maximal inhibitory concentration (IC₅₀) of each oligonucleotide is also presented. GHR mRNA levels were significantly reduced in a dose-dependent manner in antisense oligonucleotide treated cells.

TABLE 86

| | | | 0.37 | 1.11 | 3.33 | 10.00 | IC₅₀ |
|---|---|---|---|---|---|---|---|
| ISIS No | Chemistry | 0.12 μM | μM | μM | μM | μM | (μM) |
| 541262 | Deoxy, MOE | 40 | 52 | 75 | 92 | 98 | 0.3 |
| | and cEt | | | | | | |
| 541742 | Deoxy, MOE | 40 | 57 | 51 | 91 | 96 | 0.2 |
| | and cEt | | | | | | |
| 541767 | Deoxy, MOE | 36 | 59 | 60 | 78 | 91 | 0.4 |
| | and cEt | | | | | | |
| 541875 | Deoxy, MOE | 54 | 76 | 88 | 95 | 95 | <0.1 |
| | and cEt | | | | | | |
| 541881 | Deoxy, MOE | 53 | 75 | 85 | 98 | 98 | <0.1 |
| | and cEt | | | | | | |
| 542101 | Deoxy, MOE | 38 | 55 | 78 | 89 | 97 | 0.2 |
| | and cEt | | | | | | |
| 542112 | Deoxy, MOE | 28 | 50 | 74 | 89 | 96 | 0.4 |
| | and cEt | | | | | | |
| 542118 | Deoxy, MOE | 20 | 45 | 69 | 84 | 91 | 0.5 |
| | and cEt | | | | | | |
| 542125 | Deoxy, MOE | 33 | 62 | 77 | 92 | 97 | 0.3 |
| | and cEt | | | | | | |
| 542127 | Deoxy, MOE | 30 | 50 | 65 | 86 | 92 | 0.4 |
| | and cEt | | | | | | |
| 542128 | Deoxy, MOE | 25 | 40 | 52 | 80 | 93 | 0.7 |
| | and cEt | | | | | | |
| 542153 | Deoxy, MOE | 10 | 31 | 51 | 73 | 85 | 1.0 |
| | and cEt | | | | | | |
| 542185 | Deoxy, MOE | 12 | 45 | 65 | 85 | 93 | 0.6 |
| | and cEt | | | | | | |
| 542186 | Deoxy, MOE | 36 | 54 | 74 | 90 | 96 | 0.3 |
| | and cEt | | | | | | |
| 542051 | Deoxy, MOE | 9 | 29 | 32 | 32 | 42 | >10 |
| | and cEt | | | | | | |

TABLE 87

| | | | | 1.11 | 3.33 | 10.00 | IC₅₀ |
|---|---|---|---|---|---|---|---|
| ISIS No | Chemistry | 0.12 μM | 0.37 μM | μM | μM | μM | (μM) |
| 523435 | 5-10-5 | 35 | 47 | 61 | 74 | 85 | 0.5 |
| | MOE | | | | | | |
| 523723 | 5-10-5 | 4 | 16 | 40 | 66 | 86 | 1.8 |
| | MOE | | | | | | |
| 532254 | 5-10-5 | 14 | 15 | 24 | 16 | 9 | >10 |
| | MOE | | | | | | |
| 532401 | 5-10-5 | 37 | 54 | 73 | 88 | 94 | 0.3 |
| | MOE | | | | | | |
| 533932 | 5-10-5 | 23 | 40 | 69 | 78 | 86 | 0.6 |
| | MOE | | | | | | |
| 539376 | 3-10-4 | 3 | 0 | 44 | 65 | 91 | 2.0 |
| | MOE | | | | | | |
| 539399 | 3-10-4 | 0 | 0 | 9 | 42 | 67 | 5.0 |
| | MOE | | | | | | |
| 539404 | 3-10-4 | 0 | 0 | 26 | 52 | 71 | 3.5 |
| | MOE | | | | | | |
| 539416 | 3-10-4 | 8 | 29 | 62 | 89 | 93 | 0.7 |
| | MOE | | | | | | |
| 539432 | 3-10-4 | 0 | 24 | 55 | 85 | 93 | 0.9 |
| | MOE | | | | | | |
| 541262 | Deoxy, | 23 | 52 | 73 | 92 | 96 | 0.4 |
| | MOE and | | | | | | |
| | cEt | | | | | | |
| 541742 | Deoxy, | 15 | 51 | 73 | 86 | 97 | 0.5 |
| | MOE and | | | | | | |
| | cEt | | | | | | |
| 541767 | Deoxy, | 19 | 20 | 39 | 68 | 81 | 1.8 |
| | MOE and | | | | | | |
| | cEt | | | | | | |
| 545439 | Deoxy, | 0 | 0 | 30 | 61 | 90 | 2.4 |
| | MOE and | | | | | | |
| | cEt | | | | | | |
| 545447 | Deoxy, | 0 | 17 | 17 | 19 | 27 | >10 |
| | MOE and | | | | | | |
| | cEt | | | | | | |

### Example 12

### Dose-Dependent Antisense Inhibition of GHR in Hep3B Cells

[0413] Gapmers from studies described above exhibiting significant in vitro inhibition of GHR mRNA were selected and tested for their potency for GHR mRNA at various doses in Hep3B cells. Cells were plated at a density of 20,000 cells per well and transfected using electroporation with 0.12 μM, 0.37 μM, 1.11 μM, 3.33 μM, and 10.00 μM concentrations of antisense oligonucleotide. After a treatment period of approximately 16 hours, RNA was isolated from the cells and GHR mRNA levels were measured by quantitative real-time PCR. Human primer probe set RTS3437_MGB was used to measure mRNA levels. GHR mRNA levels were adjusted according to total RNA content, as measured by RIBOGREEN®. Results are presented as percent inhibition of GHR, relative to untreated control cells.

[0414] The half maximal inhibitory concentration (IC₅₀) of each oligonucleotide is also presented. GHR mRNA levels were significantly reduced in a dose-dependent manner in antisense oligonucleotide treated cells.

TABLE 88

| | | | | | 10.00 | IC₅₀ |
|---|---|---|---|---|---|---|
| ISIS No | 0.12 μM | 0.37 μM | 1.11 μM | 3.33 μM | μM | (μM) |
| 541262 | 25 | 43 | 76 | 85 | 94 | 0.5 |
| 541742 | 32 | 55 | 76 | 88 | 97 | 0.3 |
| 541767 | 29 | 56 | 83 | 89 | 97 | 0.3 |
| 541875 | 38 | 68 | 84 | 93 | 94 | 0.1 |
| 541881 | 32 | 57 | 81 | 94 | 97 | 0.3 |
| 542051 | 34 | 66 | 83 | 95 | 98 | 0.2 |
| 542101 | 25 | 55 | 85 | 95 | 98 | 0.3 |
| 542112 | 18 | 56 | 83 | 95 | 98 | 0.4 |
| 542118 | 42 | 61 | 88 | 95 | 97 | 0.1 |
| 542125 | 30 | 63 | 87 | 95 | 98 | 0.2 |
| 542127 | 50 | 70 | 91 | 91 | 98 | 0.1 |
| 542128 | 38 | 63 | 88 | 96 | 98 | 0.2 |
| 542153 | 37 | 59 | 85 | 94 | 97 | 0.2 |
| 542185 | 44 | 51 | 76 | 89 | 96 | 0.2 |
| 542186 | 46 | 59 | 84 | 95 | 97 | 0.1 |

TABLE 89

| | | | | | 10.00 | IC₅₀ |
|---|---|---|---|---|---|---|
| ISIS No | 0.12 μM | 0.37 μM | 1.11 μM | 3.33 μM | μM | (μM) |
| 523435 | 9 | 26 | 49 | 78 | 93 | 1.0 |
| 523723 | 7 | 16 | 39 | 72 | 90 | 1.4 |
| 532254 | 36 | 46 | 69 | 86 | 94 | 0.4 |
| 532401 | 25 | 54 | 71 | 86 | 91 | 0.4 |
| 533932 | 8 | 47 | 69 | 80 | 94 | 0.7 |
| 539376 | 26 | 31 | 54 | 73 | 86 | 0.8 |
| 539399 | 23 | 43 | 72 | 89 | 94 | 0.5 |
| 539404 | 30 | 60 | 88 | 95 | 98 | 0.2 |
| 539416 | 30 | 59 | 84 | 93 | 98 | 0.3 |
| 539432 | 35 | 62 | 88 | 95 | 98 | 0.2 |
| 541262 | 43 | 60 | 84 | 89 | 98 | 0.2 |
| 541742 | 23 | 53 | 73 | 84 | 97 | 0.4 |
| 541767 | 22 | 49 | 74 | 85 | 92 | 0.4 |
| 545439 | 41 | 69 | 88 | 95 | 96 | 0.1 |
| 545447 | 31 | 47 | 63 | 74 | 82 | 0.5 |

### Example 13

### Dose-Dependent Antisense Inhibition of GHR in Cynomolgus Primary Hepatocytes

[0415] Gapmers from studies described above exhibiting significant in vitro inhibition of GHR mRNA were selected and tested at various doses in cynomolgous monkey primary hepatocytes. Cells were plated at a density of 35,000 cells per well and transfected using electroporation with 0.04 μM, 0.12 μM, 0.37 μM, 1.11 μM, 3.33 μM, and 10.00 μM concentrations of antisense oligonucleotide. After a treatment period of approximately 16 hours, RNA was isolated from the cells and GHR mRNA levels were measured by quantitative real-time PCR. Primer probe set RTS3437_MGB was used to measure mRNA levels. GHR mRNA levels were adjusted according to total RNA content, as measured by RIBOGREEN®. Results are presented as percent inhibition of GHR, relative to untreated control cells.

[0416] The half maximal inhibitory concentration (IC₅₀) of each oligonucleotide is also presented. GHR mRNA levels were significantly reduced in a dose-dependent manner in antisense oligonucleotide treated cells.

TABLE 90

| | | | | 1.11 | 3.33 | 10.00 | IC₅₀ |
|---|---|---|---|---|---|---|---|
| ISIS No | 0.04 μM | 0.12 μM | 0.37 μM | μM | μM | μM | (μM) |
| 541767 | 8 | 17 | 29 | 48 | 59 | 58 | 0.4 |
| 541875 | 20 | 39 | 48 | 51 | 55 | 58 | 0.2 |
| 541881 | 23 | 36 | 49 | 60 | 56 | 58 | 0.1 |
| 542112 | 23 | 21 | 35 | 42 | 54 | 68 | 0.5 |
| 542118 | 19 | 14 | 26 | 38 | 54 | 59 | 0.8 |
| 542153 | 17 | 20 | 27 | 39 | 46 | 52 | 2.2 |
| 542185 | 20 | 23 | 27 | 46 | 39 | 56 | 2.0 |
| 532254 | 1 | 20 | 23 | 11 | 1 | 23 | >10 |
| 532401 | 0 | 15 | 24 | 39 | 47 | 55 | 1.6 |
| 523723 | 0 | 0 | 7 | 24 | 49 | 54 | 2.0 |

### Example 14

### Comparative Analysis of Dose-Dependent Antisense Inhibition of GHR in Hep3B Cells

[0417] ISIS 532401 was compared with specific antisense oligonucleotides disclosed in US 2006/0178325 by testing at various doses in Hep3B cells. The oligonucleotides were selected based on the potency demonstrated in studies described in the application. Cells were plated at a density of 20,000 cells per well and transfected using electroporation with 0.11 μM, 0.33 μM, 1.00 μM, 1.11 μM, 3.00 μM, and 9.00 μM concentrations of antisense oligonucleotide. After a treatment period of approximately 16 hours, RNA was isolated from the cells and GHR mRNA levels were measured by quantitative real-time PCR. Human primer probe set RTS3437_MGB was used to measure mRNA levels. GHR mRNA levels were adjusted according to total RNA content, as measured by RIBOGREEN®. Results are presented as percent inhibition of GHR, relative to untreated control cells.

[0418] The half maximal inhibitory concentration (IC₅₀) of each oligonucleotide is also presented. The results indicate that ISIS 532401 was markedly more potent than the most potent oligonucleotides of US 2006/0178325.

TABLE 91

| | | | | | 9.00 | IC₅₀ |
|---|---|---|---|---|---|---|
| ISIS No | 0.11 μM | 0.33 μM | 1.00 μM | 3.00 μM | μM | (μM) |
| 227452 | 11 | 12 | 46 | 73 | 92 | 1.4 |
| 227488 | 26 | 25 | 39 | 76 | 88 | 1.2 |
| 272309 | 16 | 14 | 39 | 66 | 91 | 1.6 |
| 272322 | 13 | 20 | 44 | 70 | 86 | 1.4 |
| 272328 | 22 | 20 | 24 | 43 | 56 | 5.7 |
| 272338 | 22 | 24 | 52 | 71 | 85 | 1.1 |
| 532401 | 34 | 53 | 72 | 87 | 94 | 0.3 |

### Example 15

### Tolerability of 5-10-5 MOE Gapmers Targeting Human GHR in CD1 Mice

[0419] CD10 mice (Charles River, Mass.) are a multipurpose mice model, frequently utilized for safety and efficacy testing. The mice were treated with ISIS antisense oligonucleotides selected from studies described above and evaluated for changes in the levels of various plasma chemistry markers.

### Treatment

[0420] Groups of eight- to ten-week old male CD1 mice were injected subcutaneously twice a week for 6 weeks with 50 mg/kg of ISIS oligonucleotides (100 mg/kg/week dose). One group of male CD1 mice was injected subcutaneously twice a week for 6 weeks with PBS. Mice were euthanized 48 hours after the last dose, and organs and plasma were harvested for further analysis.

### Plasma Chemistry Markers

[0421] To evaluate the effect of ISIS oligonucleotides on liver and kidney function, plasma levels of transaminases, bilirubin, creatinine, and BUN were measured using an automated clinical chemistry analyzer (Hitachi Olympus AU400e, Melville, N.Y.). The results are presented in Table 92. ISIS oligonucleotides that caused changes in the levels of any of the liver or kidney function markers outside the expected range for antisense oligonucleotides were excluded in further studies.

TABLE 92
Plasma chemistry markers in CD1 mice plasma at week 6

| | ALT | AST | Bilirubin | Creatinine | BUN |
|---|---|---|---|---|---|
| | (IU/L) | (IU/L) | (mg/dL) | (mg/dL) | (mg/dL) |
| PBS | 31 | 50 | 0.28 | 0.15 | 28 |
| ISIS 523271 | 366 | 285 | 0.18 | 0.11 | 29 |
| ISIS 523324 | 222 | 139 | 0.19 | 0.10 | 31 |
| ISIS 523604 | 2106 | 1157 | 0.41 | 0.06 | 48 |
| ISIS 532254 | 66 | 84 | 0.11 | 0.10 | 27 |
| ISIS 533121 | 176 | 155 | 0.19 | 0.09 | 27 |
| ISIS 533161 | 1094 | 904 | 0.23 | 0.07 | 29 |
| ISIS 533178 | 78 | 83 | 0.18 | 0.08 | 28 |
| ISIS 533234 | 164 | 147 | 0.21 | 0.09 | 26 |

### Hematology Assays

[0422] Blood obtained from all mice groups were sent to Antech Diagnostics for hematocrit (HCT) measurements and analysis, as well as measurements of the various blood cells, such as WBC, RBC, and platelets, and total hemoglobin content. The results are presented in Table 93. ISIS oligonucleotides that caused changes in the levels of any of the hematology markers outside the expected range for antisense oligonucleotides were excluded in further studies.

TABLE 93
Hematology markers in CD1 mice plasma at week 6

| | HCT | Hemoglobin | RBC | WBC | Platelets |
|---|---|---|---|---|---|
| | (%) | (g/dL) | (10⁶/μL) | (10³/μL) | (10³/μL) |
| PBS | 45 | 13 | 8.2 | 4.1 | 689 |
| ISIS 523271 | 42 | 12 | 7.9 | 4.5 | 1181 |
| ISIS 523324 | 39 | 11 | 7.5 | 7.9 | 980 |
| ISIS 523604 | 33 | 10 | 6.9 | 14.1 | 507 |
| ISIS 532254 | 35 | 10 | 6.9 | 7.2 | 861 |
| ISIS 533121 | 39 | 12 | 7.9 | 8.4 | 853 |
| ISIS 533161 | 49 | 14 | 9.3 | 9.0 | 607 |
| ISIS 533178 | 44 | 13 | 8.5 | 6.9 | 765 |
| ISIS 533234 | 42 | 12 | 7.8 | 9.2 | 1045 |

### Example 16

### Tolerability of 5-10-5 MOE Gapmers Targeting Human GHR in CD1 Mice

[0423] CD1® mice were treated with ISIS antisense oligonucleotides selected from studies described above and evaluated for changes in the levels of various plasma chemistry markers.

### Treatment

[0424] Groups of eight- to ten-week old male CD1 mice were injected subcutaneously twice a week for 6 weeks with 50 mg/kg of ISIS oligonucleotide (100 mg/kg/week dose). One group of male CD1 mice was injected subcutaneously twice a week for 6 weeks with PBS. Mice were euthanized 48 hours after the last dose, and organs and plasma were harvested for further analysis.

### Plasma Chemistry Markers

[0425] To evaluate the effect of ISIS oligonucleotides on liver and kidney function, plasma levels of transaminases, bilirubin, creatinine, and BUN were measured using an automated clinical chemistry analyzer (Hitachi Olympus AU400e, Melville, N.Y.). The results are presented in Table 94. ISIS oligonucleotides that caused changes in the levels of any of the liver or kidney function markers outside the expected range for antisense oligonucleotides were excluded in further studies.

TABLE 94
Plasma chemistry markers in CD1 mice plasma at week 6

| | ALT | AST | Bilirubin | Creatinine | BUN |
|---|---|---|---|---|---|
| | (IU/L) | (IU/L) | (mg/dL) | (mg/dL) | (mg/dL) |
| PBS | 30 | 59 | 0.26 | 0.14 | 20 |
| ISIS 523715 | 636 | 505 | 0.24 | 0.14 | 22 |
| ISIS 523723 | 57 | 80 | 0.20 | 0.16 | 23 |
| ISIS 523726 | 165 | 167 | 0.18 | 0.15 | 23 |
| ISIS 523736 | 140 | 177 | 0.20 | 0.15 | 23 |
| ISIS 523747 | 96 | 108 | 0.17 | 0.14 | 23 |
| ISIS 523789 | 45 | 74 | 0.20 | 0.15 | 22 |
| ISIS 532395 | 64 | 111 | 0.23 | 0.12 | 21 |
| ISIS 532401 | 47 | 88 | 0.21 | 0.17 | 22 |
| ISIS 532411 | 225 | 426 | 0.17 | 0.16 | 22 |
| ISIS 532420 | 60 | 99 | 0.21 | 0.12 | 25 |
| ISIS 532468 | 319 | 273 | 0.15 | 0.14 | 21 |
| ISIS 533932 | 62 | 81 | 0.18 | 0.14 | 21 |

### Hematology Assays

[0426] Blood obtained from all mice groups were sent to Antech Diagnostics for hematocrit (HCT) measurements and analysis, as well as measurements of the various blood cells, such as WB), RBC, and platelets, and total hemoglobin content. The results are presented in Table 95. ISIS oligonucleotides that caused changes in the levels of any of the hematology markers outside the expected range for antisense oligonucleotides were excluded in further studies.

TABLE 95
Hematology markers in CD1 mice plasma at week 6

| | HCT | Hemoglobin | RBC | WBC | Platelets |
|---|---|---|---|---|---|
| | (%) | (g/dL) | (10⁶/μL) | (10³/μL) | (10³/μL) |
| PBS | 43 | 13 | 8.1 | 3.3 | 1047 |
| ISIS 523715 | 40 | 12 | 8.1 | 4.2 | 1153 |
| ISIS 523723 | 35 | 11 | 6.8 | 2.9 | 1154 |
| ISIS 523726 | 32 | 10 | 6.8 | 5.8 | 1056 |
| ISIS 523736 | 35 | 11 | 7.1 | 3.6 | 1019 |
| ISIS 523747 | 37 | 11 | 7.7 | 2.8 | 1146 |
| ISIS 523789 | 37 | 11 | 7.3 | 2.5 | 1033 |
| ISIS 532395 | 37 | 11 | 7.4 | 4.5 | 890 |
| ISIS 532401 | 36 | 11 | 7.1 | 3.7 | 1175 |
| ISIS 532411 | 27 | 8 | 5.3 | 3.2 | 641 |
| ISIS 532420 | 35 | 11 | 7.0 | 3.3 | 1101 |
| ISIS 532468 | 36 | 11 | 7.4 | 4.0 | 1043 |
| ISIS 533932 | 36 | 11 | 7.2 | 3.8 | 981 |

### Example 17

### Tolerability of 3-10-4 MOE Gapmers Targeting Human GHR in CD1 Mice

[0427] CD1® mice were treated with ISIS antisense oligonucleotides selected from studies described above and evaluated for changes in the levels of various plasma chemistry markers.

### Treatment

[0428] Groups of eight- to ten-week old male CD1 mice were injected subcutaneously twice a week for 6 weeks with 50 mg/kg of ISIS oligonucleotide (100 mg/kg/week dose). One group of male CD1 mice was injected subcutaneously twice a week for 6 weeks with PBS. Mice were euthanized 48 hours after the last dose, and organs and plasma were harvested for further analysis.

### Plasma Chemistry Markers

[0429] To evaluate the effect of ISIS oligonucleotides on liver and kidney function, plasma levels of transaminases, bilirubin, creatinine, and BUN were measured using an automated clinical chemistry analyzer (Hitachi Olympus AU400e, Melville, N.Y.). The results are presented in Table 96. ISIS oligonucleotides that caused changes in the levels of any of the liver or kidney function markers outside the expected range for antisense oligonucleotides were excluded in further studies.

TABLE 96
Plasma chemistry markers in CD1 mice plasma at week 6

| | ALT | AST | Bilirubin | Creatinine | BUN |
|---|---|---|---|---|---|
| | (IU/L) | (IU/L) | (mg/dL) | (mg/dL) | (mg/dL) |
| PBS | 48 | 63 | 0.20 | 0.13 | 28 |
| ISIS 539302 | 204 | 192 | 0.15 | 0.15 | 24 |
| ISIS 539321 | 726 | 455 | 0.17 | 0.12 | 27 |
| ISIS 539360 | 3287 | 2495 | 0.58 | 0.13 | 22 |
| ISIS 539361 | 310 | 226 | 0.17 | 0.11 | 21 |
| ISIS 539376 | 77 | 75 | 0.14 | 0.12 | 27 |
| ISIS 539379 | 134 | 136 | 0.16 | 0.13 | 24 |
| ISIS 539380 | 180 | 188 | 0.14 | 0.12 | 23 |
| ISIS 539383 | 80 | 81 | 0.15 | 0.12 | 25 |
| ISIS 539399 | 119 | 127 | 0.13 | 0.12 | 24 |
| ISIS 539401 | 1435 | 1172 | 0.24 | 0.11 | 24 |
| ISIS 539403 | 1543 | 883 | 0.18 | 0.12 | 26 |
| ISIS 539404 | 75 | 109 | 0.16 | 0.13 | 23 |
| ISIS 539416 | 100 | 107 | 0.19 | 0.15 | 26 |
| ISIS 539432 | 55 | 64 | 0.20 | 0.14 | 22 |
| ISIS 539433 | 86 | 91 | 0.12 | 0.13 | 22 |

### Hematology Assays

[0430] Blood obtained from all mice groups were sent to Antech Diagnostics for hematocrit (HCT) measurements and analysis, as well as measurements of the various blood cells, such as WBC, RBC, and platelets, and total hemoglobin content. The results are presented in Table 97. ISIS oligonucleotides that caused changes in the levels of any of the hematology markers outside the expected range for antisense oligonucleotides were excluded in further studies.

TABLE 97
Hematology markers in CD1 mice plasma at week 6

| | HCT | Hemoglobin | RBC | WBC | Platelets |
|---|---|---|---|---|---|
| | (%) | (g/dL) | (10⁶/μL) | (10³/μL) | (10³/μL) |
| PBS | 46 | 13 | 8.5 | 6 | 954 |
| ISIS 539302 | 40 | 11 | 8.1 | 13 | 830 |
| ISIS 539321 | 39 | 11 | 7.8 | 16 | 723 |
| ISIS 539360 | 49 | 14 | 9.0 | 14 | 671 |
| ISIS 539361 | 45 | 13 | 8.5 | 9 | 893 |
| ISIS 539376 | 42 | 12 | 7.7 | 6 | 988 |
| ISIS 539379 | 42 | 12 | 8.1 | 7 | 795 |
| ISIS 539380 | 38 | 10 | 7.7 | 8 | 950 |
| ISIS 539383 | 45 | 12 | 8.4 | 8 | 795 |
| ISIS 539399 | 41 | 12 | 8.0 | 10 | 895 |
| ISIS 539401 | 41 | 11 | 8.2 | 9 | 897 |
| ISIS 539403 | 33 | 9 | 6.2 | 13 | 1104 |
| ISIS 539404 | 42 | 12 | 8.4 | 7 | 641 |
| ISIS 539416 | 41 | 11 | 7.5 | 5 | 686 |
| ISIS 539432 | 44 | 12 | 8.0 | 6 | 920 |
| ISIS 539433 | 40 | 11 | 7.4 | 6 | 987 |

### Example 18

### Tolerability of Deoxy, MOE and cEt Gapmers Targeting Human GHR in CD1 Mice

[0431] CD1® mice were treated with ISIS antisense oligonucleotides selected from studies described above and evaluated for changes in the levels of various plasma chemistry markers.

### Treatment

[0432] Groups of eight- to ten-week old male CD1 mice were injected subcutaneously twice a week for 6 weeks with 25 mg/kg of ISIS oligonucleotide (50 mg/kg/week dose). One group of male CD1 mice was injected subcutaneously twice a week for 6 weeks with PBS. Mice were euthanized 48 hours after the last dose, and organs and plasma were harvested for further analysis.

### Plasma Chemistry Markers

[0433] To evaluate the effect of ISIS oligonucleotides on liver and kidney function, plasma levels of transaminases, bilirubin, creatinine, and BUN were measured using an automated clinical chemistry analyzer (Hitachi Olympus AU400e, Melville, N.Y.). The results are presented in Table 98. ISIS oligonucleotides that caused changes in the levels of any of the liver or kidney function markers outside the expected range for antisense oligonucleotides were excluded in further studies.

TABLE 98
Plasma chemistry markers in CD1 mice plasma at week 6

| | ALT | AST | Bilirubin | Creatinine | BUN |
|---|---|---|---|---|---|
| | (IU/L) | (IU/L) | (mg/dL) | (mg/dL) | (mg/dL) |
| PBS | 36 | 71 | 0.22 | 0.18 | 22 |
| ISIS 541262 | 115 | 133 | 0.21 | 0.18 | 21 |
| ISIS 541724 | 543 | 531 | 0.34 | 0.17 | 21 |
| ISIS 541742 | 44 | 71 | 0.18 | 0.16 | 21 |
| ISIS 541748 | 269 | 582 | 0.16 | 0.15 | 22 |
| ISIS 541749 | 626 | 491 | 0.20 | 0.20 | 22 |
| ISIS 541750 | 1531 | 670 | 0.20 | 0.18 | 23 |
| ISIS 541766 | 2107 | 1139 | 0.21 | 0.21 | 23 |
| ISIS 541767 | 42 | 62 | 0.21 | 0.17 | 20 |
| ISIS 541822 | 493 | 202 | 0.13 | 0.16 | 22 |
| ISIS 541826 | 889 | 398 | 0.21 | 0.14 | 17 |
| ISIS 541838 | 266 | 172 | 0.16 | 0.15 | 20 |
| ISIS 541870 | 445 | 272 | 0.23 | 0.16 | 23 |
| ISIS 541875 | 103 | 114 | 0.20 | 0.15 | 20 |
| ISIS 541907 | 940 | 725 | 0.16 | 0.19 | 35 |
| ISIS 541991 | 1690 | 1733 | 0.31 | 0.20 | 23 |

### Hematology Assays

[0434] Blood obtained from all mice groups were sent to Antech Diagnostics for hematocrit (HCT) measurements and analysis, as well as measurements of the various blood cells, such as WBC, RBC, and platelets, and total hemoglobin content. The results are presented in Table 99. ISIS oligonucleotides that caused changes in the levels of any of the hematology markers outside the expected range for antisense oligonucleotides were excluded in further studies.

TABLE 99
Hematology markers in CD1 mice plasma at week 6

| | HCT | Hemoglobin | RBC | WBC | Platelets |
|---|---|---|---|---|---|
| | (%) | (g/dL) | (10⁶/μL) | (10³/μL) | (10³/μL) |
| PBS | 37 | 11 | 7 | 3 | 1083 |
| ISIS 541262 | 38 | 11 | 7 | 6 | 1010 |
| ISIS 541724 | 52 | 16 | 10 | 9 | 940 |
| ISIS 541742 | 47 | 14 | 9 | 6 | 1134 |
| ISIS 541748 | 41 | 12 | 8 | 7 | 941 |
| ISIS 541749 | 41 | 12 | 8 | 5 | 1142 |
| ISIS 541750 | 42 | 12 | 8 | 4 | 1409 |
| ISIS 541766 | 39 | 11 | 7 | 7 | 989 |
| ISIS 541767 | 46 | 14 | 9 | 2 | 994 |
| ISIS 541822 | 42 | 12 | 8 | 3 | 1190 |
| ISIS 541826 | 41 | 12 | 8 | 10 | 1069 |
| ISIS 541838 | 44 | 13 | 8 | 6 | 1005 |
| ISIS 541870 | 38 | 11 | 7 | 8 | 1020 |
| ISIS 541875 | 44 | 13 | 8 | 6 | 1104 |
| ISIS 541907 | 40 | 11 | 8 | 9 | 1271 |
| ISIS 541991 | 34 | 10 | 6 | 6 | 1274 |

### Example 19

### Tolerability of Deoxy, MOE and cEt Gapmers Targeting Human GHR in CD1 Mice

[0435] CD1® mice were treated with ISIS antisense oligonucleotides selected from studies described above and evaluated for changes in the levels of various plasma chemistry markers. The 3-10-4 MOE gapmer ISIS 539376 was also included in the study.

### Treatment

[0436] Groups of eight- to ten-week old male CD1 mice were injected subcutaneously twice a week for 6 weeks with 25 mg/kg of ISIS oligonucleotide (50 mg/kg/week dose). One group of male CD1 mice was injected subcutaneously twice a week for 6 weeks with PBS. Mice were euthanized 48 hours after the last dose, and organs and plasma were harvested for further analysis.

### Plasma Chemistry Markers

[0437] To evaluate the effect of ISIS oligonucleotides on liver and kidney function, plasma levels of transaminases, bilirubin, creatinine, and BUN were measured using an automated clinical chemistry analyzer (Hitachi Olympus AU400e, Melville, N.Y.). The results are presented in Table 100. ISIS oligonucleotides that caused changes in the levels of any of the liver or kidney function markers outside the expected range for antisense oligonucleotides were excluded in further studies.

TABLE 100
Plasma chemistry markers in CD1 mice plasma at week 6

| | ALT | AST | Bilirubin | Creatinine | BUN |
|---|---|---|---|---|---|
| | (IU/L) | (IU/L) | (mg/dL) | (mg/dL) | (mg/dL) |
| PBS | 43 | 66 | 0.21 | 0.11 | 20 |
| ISIS 541881 | 63 | 109 | 0.28 | 0.13 | 23 |
| ISIS 541936 | 3260 | 2108 | 0.40 | 0.13 | 24 |
| ISIS 542051 | 97 | 119 | 0.23 | 0.12 | 23 |
| ISIS 542052 | 454 | 236 | 0.23 | 0.12 | 25 |
| ISIS 542069 | 293 | 211 | 0.23 | 0.13 | 27 |
| ISIS 542085 | 91 | 87 | 0.18 | 0.10 | 21 |
| ISIS 542086 | 137 | 133 | 0.24 | 0.10 | 23 |
| ISIS 542094 | 86 | 143 | 0.23 | 0.13 | 21 |
| ISIS 542101 | 46 | 74 | 0.19 | 0.10 | 21 |
| ISIS 542102 | 4920 | 2432 | 2.30 | 0.15 | 29 |
| ISIS 542105 | 1255 | 575 | 0.35 | 0.13 | 21 |
| ISIS 542106 | 3082 | 2295 | 3.42 | 0.17 | 23 |
| ISIS 542107 | 4049 | 3092 | 0.50 | 0.14 | 20 |
| ISIS 542108 | 1835 | 859 | 0.32 | 0.11 | 21 |
| ISIS 539376 | 40 | 79 | 0.27 | 0.08 | 22 |

### Hematology Assays

[0438] Blood obtained from all mice groups were sent to Antech Diagnostics for hematocrit (HCT) measurements and analysis, as well as measurements of the various blood cells, such as WBC, RBC, and total hemoglobin content. The results are presented in Table 101. ISIS oligonucleotides that caused changes in the levels of any of the hematology markers outside the expected range for antisense oligonucleotides were excluded in further studies.

TABLE 101
Hematology markers in CD1 mice plasma at week 6

| | HCT | Hemoglobin | RBC | WBC |
|---|---|---|---|---|
| | (%) | (g/dL) | (10⁶/μL) | (10³/μL) |
| PBS | 46 | 13 | 8 | 6 |
| ISIS 541881 | 53 | 15 | 10 | 7 |
| ISIS 541936 | 41 | 11 | 8 | 18 |
| ISIS 542051 | 49 | 14 | 9 | 8 |
| ISIS 542052 | 46 | 13 | 9 | 9 |
| ISIS 542069 | 43 | 13 | 8 | 7 |
| ISIS 542085 | 38 | 11 | 7 | 5 |
| ISIS 542086 | 49 | 14 | 9 | 9 |
| ISIS 542094 | 36 | 10 | 6 | 5 |
| ISIS 542101 | 44 | 13 | 9 | 5 |
| ISIS 542102 | 27 | 7 | 5 | 25 |
| ISIS 542105 | 42 | 12 | 8 | 7 |
| ISIS 542106 | 37 | 10 | 7 | 14 |
| ISIS 542107 | 41 | 12 | 7 | 17 |
| ISIS 542108 | 51 | 14 | 8 | 10 |
| ISIS 539376 | 49 | 14 | 10 | 5 |

### Example 20

### Tolerability of Deoxy, MOE and cEt Gapmers Targeting Human GHR in CD1 Mice

[0439] CD1® mice were treated with ISIS antisense oligonucleotides selected from studies described above and evaluated for changes in the levels of various plasma chemistry markers.

### Treatment

[0440] Groups of eight- to ten-week old male CD1 mice were injected subcutaneously twice a week for 6 weeks with 25 mg/kg of ISIS oligonucleotide (50 mg/kg/week dose). One group of male CD1 mice was injected subcutaneously twice a week for 6 weeks with PBS. Mice were euthanized 48 hours after the last dose, and organs and plasma were harvested for further analysis.

### Plasma Chemistry Markers

[0441] To evaluate the effect of ISIS oligonucleotides on liver and kidney function, plasma levels of transaminases, bilirubin, creatinine, and BUN were measured using an automated clinical chemistry analyzer (Hitachi Olympus AU400e, Melville, N.Y.). The results are presented in Table 102. ISIS oligonucleotides that caused changes in the levels of any of the liver or kidney function markers outside the expected range for antisense oligonucleotides were excluded in further studies.

TABLE 102
Plasma chemistry markers in CD1 mice plasma at week 6

| | ALT | AST | Bilirubin | Creatinine | BUN |
|---|---|---|---|---|---|
| | (IU/L) | (IU/L) | (mg/dL) | (mg/dL) | (mg/dL) |
| PBS | 51 | 63 | 0.3 | 0.14 | 27 |
| ISIS 542109 | 3695 | 2391 | 0.8 | 0.19 | 24 |
| ISIS 542112 | 119 | 104 | 0.3 | 0.16 | 28 |
| ISIS 542118 | 66 | 86 | 0.3 | 0.15 | 26 |
| ISIS 542122 | 1112 | 350 | 0.3 | 0.16 | 27 |
| ISIS 542125 | 79 | 92 | 0.2 | 0.13 | 26 |
| ISIS 542126 | 381 | 398 | 0.5 | 0.14 | 23 |
| ISIS 542127 | 54 | 85 | 0.3 | 0.16 | 26 |
| ISIS 542128 | 55 | 89 | 0.2 | 0.12 | 24 |
| ISIS 542145 | 834 | 671 | 0.3 | 0.11 | 24 |
| ISIS 542146 | 163 | 107 | 0.2 | 0.14 | 30 |
| ISIS 542149 | 974 | 752 | 0.3 | 0.12 | 26 |
| ISIS 542150 | 2840 | 2126 | 2.4 | 0.17 | 23 |
| ISIS 542153 | 53 | 75 | 0.2 | 0.14 | 28 |
| ISIS 542157 | 137 | 122 | 0.3 | 0.13 | 25 |
| ISIS 542185 | 57 | 72 | 0.2 | 0.11 | 23 |
| ISIS 542186 | 62 | 84 | 0.2 | 0.12 | 24 |
| ISIS 545431 | 2622 | 1375 | 3.0 | 0.15 | 28 |
| ISIS 545438 | 1710 | 1000 | 0.3 | 0.14 | 26 |
| ISIS 545439 | 70 | 117 | 0.2 | 0.12 | 28 |
| ISIS 545447 | 141 | 108 | 0.3 | 0.13 | 26 |

### Hematology Assays

[0442] Blood obtained from all mice groups were sent to Antech Diagnostics for hematocrit (HCT) measurements and analysis, as well as measurements of the various blood cells, such as WBC, RBC, and total hemoglobin content. The results are presented in Table 103. ISIS oligonucleotides that caused changes in the levels of any of the hematology markers outside the expected range for antisense oligonucleotides were excluded in further studies.

TABLE 103
Hematology markers in CD1 mice plasma at week 6

| | HCT | Hemoglobin | RBC | WBC | Platelets |
|---|---|---|---|---|---|
| | (%) | (g/dL) | (10⁶/μL) | (10³/μL) | (10³/μL) |
| PBS | 40 | 12 | 7 | 6 | 1210 |
| ISIS 542109 | 47 | 13 | 9 | 16 | 1244 |
| ISIS 542112 | 50 | 13 | 8 | 7 | 1065 |
| ISIS 542118 | 42 | 12 | 8 | 8 | 1120 |
| ISIS 542122 | 37 | 11 | 7 | 7 | 1064 |
| ISIS 542125 | 42 | 13 | 8 | 7 | 1063 |
| ISIS 542126 | 34 | 10 | 7 | 9 | 1477 |
| ISIS 542127 | 41 | 12 | 7 | 7 | 1144 |
| ISIS 542128 | 40 | 12 | 7 | 6 | 1196 |
| ISIS 542145 | 42 | 12 | 8 | 8 | 1305 |
| ISIS 542146 | 45 | 13 | 8 | 7 | 1310 |
| ISIS 542149 | 33 | 10 | 6 | 12 | 903 |
| ISIS 542150 | 27 | 7 | 5 | 18 | 1202 |
| ISIS 542153 | 46 | 13 | 8 | 5 | 1130 |
| ISIS 542157 | 44 | 12 | 9 | 6 | 791 |
| ISIS 542185 | 45 | 13 | 8 | 3 | 1031 |
| ISIS 542186 | 44 | 12 | 8 | 6 | 985 |
| ISIS 545431 | 28 | 7 | 6 | 13 | 2609 |
| ISIS 545438 | 40 | 11 | 8 | 8 | 1302 |
| ISIS 545439 | 48 | 13 | 9 | 4 | 857 |
| ISIS 545447 | 45 | 13 | 9 | 9 | 964 |

### Example 21

### Tolerability of MOE Gapmers Targeting Human GHR in Sprague-Dawley Rats

[0443] Sprague-Dawley rats are a multipurpose model used for safety and efficacy evaluations. The rats were treated with ISIS antisense oligonucleotides from the studies described in the Examples above and evaluated for changes in the levels of various plasma chemistry markers.

### Treatment

[0444] Male Sprague-Dawley rats were maintained on a 12-hour light/dark cycle and fed ad libitum with Purina normal rat chow, diet 5001. Groups of 4 Sprague-Dawley rats each were injected subcutaneously twice a week for 6 weeks with 50 mg/kg of ISIS oligonucleotide (100 mg/kg weekly dose). Forty eight hours after the last dose, rats were euthanized and organs and plasma were harvested for further analysis.

### Liver Function

[0445] To evaluate the effect of ISIS oligonucleotides on hepatic function, plasma levels of transaminases were measured using an automated clinical chemistry analyzer (Hitachi Olympus AU400e, Melville, N.Y.). Plasma levels of ALT (alanine transaminase) and AST (aspartate transaminase) were measured and the results are presented in Table 104 expressed in IU/L. Plasma levels of bilirubin were also measured using the same clinical chemistry analyzer and the results are also presented in Table 104 expressed in mg/dL. ISIS oligonucleotides that caused changes in the levels of any markers of liver function outside the expected range for antisense oligonucleotides were excluded in further studies.

TABLE 104
Liver function markers in Sprague-Dawley rats

| | ALT | AST | Bilirubin |
|---|---|---|---|
| | (IU/L) | (IU/L) | (mg/dL) |
| PBS | 69 | 90 | 0.15 |
| ISIS 523723 | 79 | 123 | 0.12 |
| ISIS 523789 | 71 | 105 | 0.15 |
| ISIS 532254 | 67 | 97 | 0.14 |
| ISIS 532401 | 61 | 77 | 0.12 |
| ISIS 532420 | 102 | 127 | 0.17 |
| ISIS 533178 | 157 | 219 | 0.34 |
| ISIS 533234 | 71 | 90 | 0.11 |
| ISIS 533932 | 58 | 81 | 0.12 |
| ISIS 539376 | 75 | 101 | 0.14 |
| ISIS 539380 | 86 | 128 | 0.16 |
| ISIS 539383 | 64 | 94 | 0.14 |
| ISIS 539399 | 52 | 95 | 0.14 |
| ISIS 539404 | 88 | 118 | 0.13 |
| ISIS 539416 | 63 | 104 | 0.14 |
| ISIS 539432 | 63 | 90 | 0.13 |
| ISIS 539433 | 69 | 92 | 0.13 |

### Kidney Function

[0446] To evaluate the effect of ISIS oligonucleotides on kidney function, plasma levels of blood urea nitrogen (BUN) and creatinine were measured using an automated clinical chemistry analyzer (Hitachi Olympus AU400e, Melville, N.Y.). Results are presented in Table 105, expressed in mg/dL. ISIS oligonucleotides that caused changes in the levels of any of the kidney function markers outside the expected range for antisense oligonucleotides were excluded in further studies.

TABLE 105
Kidney function markers (mg/dL) in Sprague-Dawley rats

| | BUN | Creatinine |
|---|---|---|
| PBS | 24 | 0.32 |
| ISIS 523723 | 20 | 0.39 |
| ISIS 523789 | 19 | 0.37 |
| ISIS 532254 | 21 | 0.43 |
| ISIS 532401 | 17 | 0.36 |
| ISIS 532420 | 20 | 0.31 |
| ISIS 533178 | 20 | 0.43 |
| ISIS 533234 | 22 | 0.41 |
| ISIS 533932 | 19 | 0.43 |
| ISIS 539376 | 19 | 0.36 |
| ISIS 539380 | 18 | 0.35 |
| ISIS 539383 | 19 | 0.35 |
| ISIS 539399 | 18 | 0.39 |
| ISIS 539404 | 23 | 0.39 |
| ISIS 539416 | 17 | 0.39 |
| ISIS 539432 | 20 | 0.39 |
| ISIS 539433 | 20 | 0.34 |

### Hematology Assays

[0447] Blood obtained from all rat groups were sent to Antech Diagnostics for hematocrit (HCT) measurements and analysis, as well as measurements of the various blood cells, such as WBC, RBC, and total hemoglobin content. The results are presented in Table 106. ISIS oligonucleotides that caused changes in the levels of any of the hematology markers outside the expected range for antisense oligonucleotides were excluded in further studies.

TABLE 106
Hematology markers in Sprague-Dawley rats

| | HCT | Hemoglobin | RBC | WBC | Platelets |
|---|---|---|---|---|---|
| | (%) | (g/dL) | (10⁶/μL) | (10³/μL) | (10³/μL) |
| PBS | 46 | 15 | 8 | 11 | 1078 |
| ISIS 523723 | 38 | 12 | 7 | 19 | 626 |
| ISIS 523789 | 38 | 12 | 8 | 12 | 702 |
| ISIS 532254 | 36 | 12 | 7 | 11 | 547 |
| ISIS 532401 | 42 | 14 | 8 | 12 | 858 |
| ISIS 532420 | 37 | 12 | 7 | 17 | 542 |
| ISIS 533178 | 37 | 12 | 7 | 15 | 1117 |
| ISIS 533234 | 38 | 12 | 7 | 8 | 657 |
| ISIS 533932 | 40 | 13 | 7 | 9 | 999 |
| ISIS 539376 | 43 | 14 | 9 | 8 | 910 |
| ISIS 539380 | 33 | 11 | 5 | 6 | 330 |
| ISIS 539383 | 39 | 13 | 7 | 10 | 832 |
| ISIS 539399 | 37 | 11 | 7 | 4 | 603 |
| ISIS 539404 | 37 | 12 | 7 | 6 | 639 |
| ISIS 539416 | 33 | 11 | 6 | 9 | 601 |
| ISIS 539432 | 44 | 14 | 9 | 10 | 810 |
| ISIS 539433 | 38 | 12 | 7 | 9 | 742 |

### Organ Weights

[0448] Liver, heart, spleen and kidney weights were measured at the end of the study, and are presented in Table 107. ISIS oligonucleotides that caused any changes in organ weights outside the expected range for antisense oligonucleotides were excluded from further studies.

TABLE 107
Organ weights (g)

| | Heart | Liver | Spleen | Kidney |
|---|---|---|---|---|
| PBS | 0.35 | 3.6 | 0.2 | 0.8 |
| ISIS 523723 | 0.31 | 4.9 | 0.7 | 0.8 |
| ISIS 523789 | 0.34 | 4.8 | 0.6 | 0.8 |
| ISIS 532254 | 0.32 | 5.0 | 0.6 | 1.0 |
| ISIS 532401 | 0.32 | 3.8 | 0.4 | 0.8 |
| ISIS 532420 | 0.29 | 4.6 | 0.7 | 1.0 |
| ISIS 533178 | 0.34 | 5.2 | 0.7 | 0.9 |
| ISIS 533234 | 0.30 | 4.4 | 0.6 | 1.0 |
| ISIS 533932 | 0.31 | 3.9 | 0.5 | 0.9 |
| ISIS 539376 | 0.29 | 4.4 | 0.4 | 0.8 |
| ISIS 539380 | 0.31 | 6.3 | 1.6 | 1.2 |
| ISIS 539383 | 0.31 | 4.5 | 0.6 | 1.0 |
| ISIS 539399 | 0.31 | 4.5 | 0.8 | 1.0 |
| ISIS 539404 | 0.34 | 4.9 | 0.6 | 1.0 |
| ISIS 539416 | 0.32 | 4.7 | 0.7 | 0.9 |
| ISIS 539432 | 0.30 | 3.8 | 0.4 | 0.8 |
| ISIS 539433 | 0.28 | 4.1 | 0.7 | 1.0 |

### Example 22

### Tolerability of Deoxy, MOE, and cEt Gapmers Targeting Human GHR in Sprague-Dawley Rats

[0449] Sprague-Dawley rats were treated with ISIS antisense oligonucleotides from the studies described in the Examples above and evaluated for changes in the levels of various plasma chemistry markers.

### Treatment

[0450] Male Sprague-Dawley rats were maintained on a 12-hour light/dark cycle and fed ad libitum with Purina normal rat chow, diet 5001. Groups of 4 Sprague-Dawley rats each were injected subcutaneously once a week for 6 weeks with 50 mg/kg of ISIS oligonucleotide (50 mg/kg weekly dose). Two groups of rats were injected subcutaneously once a week for 6 weeks with PBS. Forty eight hours after the last dose, rats were euthanized and organs and plasma were harvested for further analysis.

### Liver Function

[0451] To evaluate the effect of ISIS oligonucleotides on hepatic function, plasma levels of transaminases were measured using an automated clinical chemistry analyzer (Hitachi Olympus AU400e, Melville, N.Y.). Plasma levels of ALT and AST were measured and the results are presented in Table 108 expressed in IU/L. Plasma levels of bilirubin were also measured using the same clinical chemistry analyzer and the results are also presented in Table 108 expressed in mg/dL. ISIS oligonucleotides that caused changes in the levels of any markers of liver function outside the expected range for antisense oligonucleotides were excluded in further studies.

TABLE 108
Liver function markers in Sprague-Dawley rats

| | ALT | AST | Bilirubin |
|---|---|---|---|
| | (IU/L) | (IU/L) | (mg/dL) |
| PBS group 1 | 34 | 56 | 0.08 |
| PBS group 2 | 37 | 54 | 0.09 |
| ISIS 541881 | 53 | 77 | 0.12 |
| ISIS 542051 | 61 | 96 | 0.09 |
| ISIS 542101 | 64 | 214 | 0.10 |
| ISIS 542112 | 46 | 72 | 0.10 |
| ISIS 542118 | 42 | 60 | 0.08 |
| ISIS 542125 | 39 | 67 | 0.10 |
| ISIS 542127 | 56 | 75 | 0.12 |
| ISIS 542128 | 45 | 71 | 0.12 |
| ISIS 542153 | 44 | 69 | 0.11 |
| ISIS 542185 | 44 | 93 | 0.09 |
| ISIS 542186 | 51 | 107 | 0.12 |
| ISIS 545439 | 41 | 73 | 0.10 |
| ISIS 545447 | 103 | 114 | 0.10 |
| ISIS 541262 | 106 | 133 | 0.12 |
| ISIS 541742 | 56 | 102 | 0.11 |
| ISIS 541767 | 53 | 69 | 0.09 |
| ISIS 541875 | 70 | 133 | 0.08 |

### Kidney Function

[0452] To evaluate the effect of ISIS oligonucleotides on kidney function, plasma levels of blood urea nitrogen (BUN) and creatinine were measured using an automated clinical chemistry analyzer (Hitachi Olympus AU400e, Melville, N.Y.). Results are presented in Table 109, expressed in mg/dL. ISIS oligonucleotides that caused changes in the levels of any of the kidney function markers outside the expected range for antisense oligonucleotides were excluded in further studies.

TABLE 109
Kidney function markers (mg/dL) in Sprague-Dawley rats

| | BUN | Creatinine |
|---|---|---|
| PBS group 1 | 16 | 0.2 |
| PBS group 2 | 15 | 0.2 |
| ISIS 541881 | 22 | 0.3 |
| ISIS 542051 | 18 | 0.2 |
| ISIS 542101 | 22 | 0.3 |
| ISIS 542112 | 18 | 0.2 |
| ISIS 542118 | 18 | 0.3 |
| ISIS 542125 | 18 | 0.3 |
| ISIS 542127 | 19 | 0.3 |
| ISIS 542128 | 18 | 0.3 |
| ISIS 542153 | 17 | 0.3 |
| ISIS 542185 | 19 | 0.3 |
| ISIS 542186 | 19 | 0.3 |
| ISIS 545439 | 16 | 0.2 |
| ISIS 545447 | 16 | 0.2 |
| ISIS 541262 | 21 | 0.4 |
| ISIS 541742 | 19 | 0.2 |
| ISIS 541767 | 15 | 0.2 |
| ISIS 541875 | 16 | 0.2 |

### Hematology Assays

[0453] Blood obtained from all rat groups were sent to Antech Diagnostics for hematocrit (HCT) measurements and analysis, as well as measurements of the various blood cells, such as WBC, RBC, and total hemoglobin content. The results are presented in Table 110. ISIS oligonucleotides that caused changes in the levels of any of the hematology markers outside the expected range for antisense oligonucleotides were excluded in further studies.

TABLE 110
Hematology markers in Sprague-Dawley rats

| | HCT | Hemoglobin | RBC | WBC | Platelets |
|---|---|---|---|---|---|
| | (%) | (g/dL) | (10⁶/μL) | (10³/μL) | (10³/μL) |
| PBS group 1 | 43 | 14 | 7 | 7 | 775 |
| PBS group 2 | 49 | 15 | 8 | 8 | 1065 |
| ISIS 541881 | 41 | 13 | 8 | 6 | 553 |
| ISIS 542051 | 39 | 13 | 7 | 9 | 564 |
| ISIS 542101 | 37 | 12 | 7 | 15 | 603 |
| ISIS 542112 | 45 | 14 | 8 | 10 | 587 |
| ISIS 542118 | 47 | 15 | 8 | 7 | 817 |
| ISIS 542125 | 41 | 13 | 7 | 7 | 909 |
| ISIS 542127 | 44 | 14 | 8 | 10 | 872 |
| ISIS 542128 | 44 | 14 | 8 | 7 | 679 |
| ISIS 542153 | 48 | 15 | 8 | 7 | 519 |
| ISIS 542185 | 44 | 14 | 8 | 9 | 453 |
| ISIS 542186 | 44 | 14 | 8 | 12 | 433 |
| ISIS 545439 | 40 | 12 | 7 | 11 | 733 |
| ISIS 545447 | 43 | 13 | 8 | 9 | 843 |
| ISIS 541262 | 46 | 14 | 8 | 17 | 881 |
| ISIS 541742 | 47 | 15 | 8 | 10 | 813 |
| ISIS 541767 | 53 | 16 | 9 | 9 | 860 |
| ISIS 541875 | 42 | 13 | 7 | 9 | 840 |

### Organ Weights

[0454] Liver, heart, spleen and kidney weights were measured at the end of the study, and are presented in Table 111. ISIS oligonucleotides that caused any changes in organ weights outside the expected range for antisense oligonucleotides were excluded from further studies.

TABLE 111
Organ weights (g)

| | Heart | Liver | Spleen | Kidney |
|---|---|---|---|---|
| PBS group 1 | 0.4 | 3.7 | 0.2 | 0.9 |
| PBS group 2 | 0.3 | 3.2 | 0.2 | 0.7 |
| ISIS 541881 | 0.4 | 3.4 | 0.4 | 0.9 |
| ISIS 542051 | 0.4 | 3.8 | 0.4 | 1.0 |
| ISIS 542101 | 0.3 | 4.2 | 0.6 | 1.1 |
| ISIS 542112 | 0.3 | 3.7 | 0.4 | 0.8 |
| ISIS 542118 | 0.4 | 3.6 | 0.2 | 0.8 |
| ISIS 542125 | 0.4 | 3.7 | 0.3 | 1.1 |
| ISIS 542127 | 0.3 | 4.2 | 0.3 | 0.8 |
| ISIS 542128 | 0.3 | 3.5 | 0.3 | 0.8 |
| ISIS 542153 | 0.3 | 3.5 | 0.3 | 0.8 |
| ISIS 542185 | 0.4 | 3.8 | 0.4 | 0.9 |
| ISIS 542186 | 0.3 | 3.8 | 0.6 | 0.9 |
| ISIS 545439 | 0.4 | 4.1 | 0.3 | 0.9 |
| ISIS 545447 | 0.4 | 3.4 | 0.3 | 1.1 |
| ISIS 541262 | 0.3 | 3.4 | 0.3 | 2.0 |
| ISIS 541742 | 0.3 | 3.8 | 0.3 | 0.8 |
| ISIS 541767 | 0.3 | 3.4 | 0.2 | 0.8 |
| ISIS 541875 | 0.3 | 5.2 | 0.4 | 1.0 |

### Example 23

### Effect of ISIS Antisense Oligonucleotides Targeting Human GHR in Cynomolgus Monkeys

[0455] Cynomolgus monkeys were treated with ISIS antisense oligonucleotides selected from studies described in the Examples above. Antisense oligonucleotide efficacy and tolerability, as well as their pharmacokinetic profile in the liver and kidney, were evaluated.

[0456] At the time this study was undertaken, the cynomolgus monkey genomic sequence was not available in the National Center for Biotechnology Information (NCBI) database; therefore, cross-reactivity with the cynomolgus monkey gene sequence could not be confirmed. Instead, the sequences of the ISIS antisense oligonucleotides used in the cynomolgus monkeys was compared to a rhesus monkey sequence for homology. It is expected that ISIS oligonucleotides with homology to the rhesus monkey sequence are fully cross-reactive with the cynomolgus monkey sequence as well. The human antisense oligonucleotides tested are cross-reactive with the rhesus genomic sequence (GENBANK Accession No. NW_001120958.1 truncated from nucleotides 4410000 to 4720000, designated herein as SEQ ID NO: 2296). The greater the complementarity between the human oligonucleotide and the rhesus monkey sequence, the more likely the human oligonucleotide can cross-react with the rhesus monkey sequence. The start and stop sites of each oligonucleotide to SEQ ID NO: 2296 is presented in Table 112. “Start site” indicates the 5′-most nucleotide to which the gapmer is targeted in the rhesus monkey gene sequence.

TABLE 112
Antisense oligonucleotides complementary to the rhesus
GHR genomic sequence (SEQ ID NO: 2296)

| | Target | Target | | |
|---|---|---|---|---|
| | Start | Stop | | SEQ ID |
| ISIS No | Site | Site | Chemistry | NO |
| 523723 | 149071 | 149090 | 5-10-5 MOE | 918 |
| 532254 | 64701 | 64720 | 5-10-5 MOE | 479 |
| 532401 | 147560 | 147579 | 5-10-5 MOE | 703 |
| 541767 | 152700 | 152715 | Deoxy, MOE | 1800 |
| | | | and cEt | |
| 541875 | 210099 | 210114 | Deoxy, MOE | 1904 |
| | | | and cEt | |
| 542112 | 146650 | 146665 | Deoxy, MOE | 2122 |
| | | | and cEt | |
| 542118 | 149074 | 149089 | Deoxy, MOE | 2127 |
| | | | and cEt | |
| 542185 | 245782 | 245797 | Deoxy, MOE | 2194 |
| | | | and cEt | |

### Study 1

[0457] Prior to the study, the monkeys were kept in quarantine during which the animals were observed daily for general health. The monkeys were 2-4 years old and weighed between 2 and 4 kg. Nine groups of 5 randomly assigned male cynomolgus monkeys each were injected subcutaneously with ISIS oligonucleotide or PBS using a stainless steel dosing needle and syringe of appropriate size into the intracapsular region and outer thigh of the monkeys. The monkeys were dosed three times (days 1, 4, and 7) for the first week, and then subsequently once a week for 12 weeks with 40 mg/kg of ISIS oligonucleotide. A control group of 5 cynomolgus monkeys was injected with PBS in a similar manner and served as the control group.

[0458] During the study period, the monkeys were observed twice daily for signs of illness or distress. Any animal experiencing more than momentary or slight pain or distress due to the treatment, injury or illness was treated by the veterinary staff with approved analgesics or agents to relieve the pain after consultation with the Study Director. Any animal in poor health or in a possible moribund condition was identified for further monitoring and possible euthanasia. Scheduled euthanasia of the animals was conducted on day 86 by exsanguination after ketamine/xylazine-induced anesthesia and administration of sodium pentobarbital. The protocols described in the Example were approved by the Institutional Animal Care and Use Committee (IACUC).

### Target Reduction

### RNA Analysis

[0459] On day 86, RNA was extracted from liver, white adipose tissue (WAT) and kidney for real-time PCR analysis of measurement of mRNA expression of GHR. Results are presented as percent inhibition of mRNA, relative to PBS control, normalized with RIBOGREEN®. ‘n.d.’ indicates that the data for that particular oligonucleotide was not measured. As shown in Table 113, treatment with ISIS antisense oligonucleotides resulted in significant reduction of GHR mRNA in comparison to the PBS control. Specifically, treatment with ISIS 532401 resulted in significant reduction of mRNA expression in all tissues.

[0460] The expression of the growth hormone-responsive gene, ALS was also measured in liver, kidney and adipose tissue. Treatment with ISIS 532401 resulted in ALS RNA expression reduction in liver by 44±9%, correlating with GHR levels. There was no reduction observed in adipose tissue. The expression of IGF1 in the liver was also measured. Treatment with ISIS 532401 resulted in IGF1 RNA expression reduction in liver by 71±10%, correlating with GHR levels.

TABLE 113
Percent inhibition of GHR mRNA in the cynomolgus
monkey liver relative to the PBS control

| ISIS No | Liver | Kidney | WAT |
|---|---|---|---|
| 532401 | 60 | 47 | 59 |
| 532254 | 63 | 65 | n.d. |
| 523723 | 38 | 0 | n.d. |
| 542112 | 61 | 60 | 36 |
| 542118 | 0 | 22 | 27 |
| 542185 | 66 | 53 | n.d. |
| 541767 | 0 | 14 | n.d. |
| 541875 | 34 | 77 | n.d. |

### Protein Analysis

[0461] Approximately 1 mL of blood was collected from all available animals at day 85 and placed in tubes containing the potassium salt of EDTA. The tubes were centrifuged (3000 rpm for 10 min at room temperature) to obtain plasma. Plasma levels of IGF-1 and GH were measured in the plasma. The results are presented in Table 114. The results indicate that treatment with ISIS oligonucleotides resulted in reduced IGF-1 protein levels.

[0462] Plasma levels of IGF1 after treatment with ISIS 532401 are also presented in Table 115 and demonstrate the effect of antisense inhibition of GHR in reducing IGF1 levels at day 7 and day 85.

TABLE 114
Plasma protein levels in the cynomolgus monkey

| | IGF-1 | GH |
|---|---|---|
| | (% baseline) | (ng/mL) |
| PBS | 121 | 19 |
| 532401 | 57 | 39 |
| 532254 | 51 | 26 |
| 523723 | 77 | 16 |
| 542112 | 46 | 48 |
| 542118 | 97 | 6 |
| 542185 | 59 | 32 |
| 541767 | 101 | 22 |
| 541875 | 45 | 47 |

TABLE 115
Plasma IGF1 levels in the cynomolgus monkey

| | Day 7 | Day 85 |
|---|---|---|
| PBS | 458 | 643 |
| ISIS 532401 | 326 | 263 |

### Tolerability Studies

### Body and Organ Weight Measurements

[0463] To evaluate the effect of ISIS oligonucleotides on the overall health of the animals, body and organ weights were measured. Body weights were measured on day 84 and are presented in Table 115. Organ weights were measured on day 86 and the data is also presented in Table 115. The results indicate that effect of treatment with antisense oligonucleotides on body and organ weights was within the expected range for antisense oligonucleotides. Specifically, treatment with ISIS 532401 was well tolerated in terms of the body and organ weights of the monkeys.

TABLE 115
Final body and organ weights in cynomolgus monkey

| | Body | Spleen | Kidney | Liver |
|---|---|---|---|---|
| | Wt (kg) | (g) | (g) | (g) |
| PBS | 2.7 | 2.8 | 12.3 | 56.7 |
| 532401 | 2.6 | 4.0 | 11.5 | 58.5 |
| 532254 | 2.6 | 4.8 | 15.4 | 69.5 |
| 523723 | 2.8 | 3.1 | 14.8 | 69.4 |
| 542112 | 2.6 | 3.5 | 13.6 | 60.0 |
| 542118 | 2.7 | 2.7 | 11.9 | 58.6 |
| 542185 | 2.6 | 5.5 | 17.2 | 68.5 |
| 541767 | 2.8 | 5.1 | 11.7 | 65.1 |
| 541875 | 2.8 | 5.5 | 13.2 | 55.0 |

### Liver Function

[0464] To evaluate the effect of ISIS oligonucleotides on hepatic function, blood samples were collected from all the study groups. The blood samples were collected via femoral venipuncture, 48 hrs post-dosing. The monkeys were fasted overnight prior to blood collection. Blood was collected in tubes containing K₂-EDTA anticoagulant, which were centrifuged to obtain plasma. Levels of various liver function markers were measured using a Toshiba 200FR NEO chemistry analyzer (Toshiba Co., Japan). Plasma levels of ALT and AST and bilirubin were measured. The Tables below present the results for ALT and AST levels at various time points. The results indicate that antisense oligonucleotides had no effect on liver function outside the expected range for antisense oligonucleotides. Specifically, treatment with ISIS 532401 was well tolerated in terms of the liver function in monkeys.

TABLE 116
ALT levels (IU/L) in cynomolgus monkey

| | Day 16 | Day 44 | Day 86 |
|---|---|---|---|
| PBS | 46 | 37 | 40 |
| ISIS 532401 | 63 | 59 | 88 |
| ISIS 532254 | 62 | 46 | 56 |
| ISIS 523723 | 50 | 77 | 86 |
| ISIS 542112 | 53 | 54 | 60 |
| ISIS 542118 | 38 | 41 | 52 |
| ISIS 542185 | 58 | 59 | 91 |
| ISIS 541767 | 56 | 45 | 46 |
| ISIS 541875 | 70 | 54 | 71 |

TABLE 117
AST levels (IU/L) in cynomolgus monkey

| | Day 16 | Day 44 | Day 86 |
|---|---|---|---|
| PBS | 58 | 40 | 45 |
| ISIS 532401 | 47 | 48 | 61 |
| ISIS 532254 | 71 | 81 | 98 |
| ISIS 523723 | 56 | 61 | 73 |
| ISIS 542112 | 58 | 65 | 89 |
| ISIS 542118 | 41 | 40 | 46 |
| ISIS 542185 | 61 | 63 | 98 |
| ISIS 541767 | 52 | 39 | 63 |
| ISIS 541875 | 70 | 50 | 70 |

### Kidney Function

[0465] To evaluate the effect of ISIS oligonucleotides on kidney function, blood samples were collected from all the study groups. The blood samples were collected via femoral venipuncture, 48 hrs post-dosing. The monkeys were fasted overnight prior to blood collection. Blood was collected in tubes containing K₂-EDTA anticoagulant, which were centrifuged to obtain plasma. Levels of BUN and creatinine were measured using a Toshiba 200FR NEO chemistry analyzer (Toshiba Co., Japan). The Tables below present the results for BUN and creatinine levels at various time points.

[0466] The plasma chemistry data indicate that most of the ISIS oligonucleotides did not have any effect on the kidney function outside the expected range for antisense oligonucleotides. Specifically, treatment with ISIS 532401 was well tolerated in terms of the kidney function of the monkeys.

TABLE 118
BUN levels (mg/dL) in cynomolgus monkey

| | Day 16 | Day 44 | Day 86 |
|---|---|---|---|
| PBS | 29 | 26 | 26 |
| ISIS 532401 | 27 | 27 | 27 |
| ISIS 532254 | 21 | 22 | 25 |
| ISIS 523723 | 25 | 24 | 22 |
| ISIS 542112 | 26 | 24 | 24 |
| ISIS 542118 | 29 | 27 | 29 |
| ISIS 542185 | 22 | 21 | 22 |
| ISIS 541767 | 29 | 24 | 24 |
| ISIS 541875 | 29 | 24 | 21 |

TABLE 119
Creatinine levels (mg/dL) in cynomolgus monkey

| | Day 16 | Day 44 | Day 86 |
|---|---|---|---|
| PBS | 0.9 | 0.8 | 0.9 |
| ISIS 532401 | 1.1 | 1.0 | 1.1 |
| ISIS 532254 | 1.0 | 1.0 | 1.0 |
| ISIS 523723 | 1.0 | 1.0 | 1.0 |
| ISIS 542112 | 1.0 | 0.9 | 1.0 |
| ISIS 542118 | 0.9 | 0.9 | 0.9 |
| ISIS 542185 | 1.0 | 0.9 | 0.9 |
| ISIS 541767 | 1.1 | 0.9 | 0.9 |
| ISIS 541875 | 1.2 | 1.1 | 1.1 |

### Hematology

[0467] To evaluate any effect of ISIS oligonucleotides in cynomolgus monkeys on hematologic parameters, blood samples of approximately 1.3 mL of blood was collected from each of the available study animals in tubes containing K₂-EDTA. Samples were analyzed for red blood cell (RBC) count, white blood cells (WBC) count, individual white blood cell counts, such as that of monocytes, neutrophils, lymphocytes, as well as for platelet count, hemoglobin content and hematocrit, using an ADVIA120 hematology analyzer (Bayer, USA). The Table below presents the results for platelet count at various time points. ‘n/a’ indicates that the data for that time point is not available.

[0468] The data indicate the oligonucleotides did not cause any changes in hematologic parameters outside the expected range for antisense oligonucleotides at this dose. Specifically, treatment with ISIS 532401 was well tolerated in terms of the hematologic parameters of the monkeys.

TABLE 120
Platelet count (×10³/μL) in cynomolgus monkey

| | Day 30 | Day 58 | Day 86 |
|---|---|---|---|
| PBS | 538 | 464 | 403 |
| ISIS 532401 | 493 | 465 | 395 |
| ISIS 532254 | 334 | 328 | 306 |
| ISIS 523723 | 352 | 304 | 268 |
| ISIS 542112 | 454 | 430 | 368 |
| ISIS 542118 | 418 | 379 | 377 |
| ISIS 542185 | 370 | 303 | 296 |
| ISIS 541767 | 435 | 326 | 325 |
| ISIS 541875 | 437 | 359 | n/a |

### C-Reactive Protein and Complement C3 Level Analysis

[0469] To evaluate any inflammatory effect of ISIS oligonucleotides in cynomolgus monkeys, blood samples were taken for analysis. The monkeys were fasted overnight prior to blood collection. Approximately 1.5 mL, of blood was collected from each animal and put into tubes without anticoagulant for serum separation. The tubes were kept at room temperature for a minimum of 90 min and then centrifuged at 3,000 rpm for 10 min at room temperature to obtain serum. C-reactive protein (CRP), which is synthesized in the liver and which serves as a marker of inflammation, was measured using a Toshiba 200FR NEO chemistry analyzer (Toshiba Co., Japan). The Tables below present the results for CRP and C3 levels at various time points. The results indicate that treatment with ISIS 532401 did not cause inflammation in monkeys.

TABLE 121
CRP (mg/L) in cynomolgus monkey

| | Day 16 | Day 44 | Day 86 |
|---|---|---|---|
| PBS | 3.8 | 2.0 | 2.0 |
| ISIS 532401 | 2.3 | 1.7 | 1.9 |
| ISIS 532254 | 2.1 | 3.2 | 5.9 |
| ISIS 523723 | 6.1 | 4.5 | 4.4 |
| ISIS 542112 | 2.5 | 2.7 | 2.7 |
| ISIS 542118 | 2.2 | 2.8 | 2.1 |
| ISIS 542185 | 2.3 | 11.9 | 9.3 |
| ISIS 541767 | 1.9 | 1.5 | 6.7 |
| ISIS 541875 | 4.9 | 3.5 | 8.4 |

TABLE 122
C3 (mg/dL) on day 85 (24 hours after
dosing) in cynomolgus monkey

| | C3 |
|---|---|
| PBS | 114 |
| ISIS 532401 | 96 |
| ISIS 532254 | 100 |
| ISIS 523723 | 87 |
| ISIS 542112 | 100 |
| ISIS 542118 | 110 |
| ISIS 542185 | 98 |
| ISIS 541767 | 99 |
| ISIS 541875 | 81 |

### Measurement of Oligonucleotide Concentration

[0470] The concentration of the full-length oligonucleotide in the liver and the kidney of the monkeys was measured. The method used is a modification of previously published methods (Leeds et al., 1996; Geary et al., 1999) which consist of a phenol-chloroform (liquid-liquid) extraction followed by a solid phase extraction. An internal standard (ISIS 355868, a 27-mer 2′-O-methoxyethyl modified phosphorothioate oligonucleotide, GCGTTTGCTCTTCTTCTTGCGTTTTTT, designated herein as SEQ ID NO: 2300) was added prior to extraction. Tissue sample concentrations were calculated using calibration curves, with a lower limit of quantitation (LLOQ) of approximately 1.14 μg/g. Half-lives were then calculated using WinNonlin software (PHARSIGHT).

[0471] The results are presented in Table 123, expressed as μg/g of tissue, as well as the ratio of concentration in kidney versus liver.

TABLE 123
Oligonucleotide concentration in the liver
and kidney of cynomolgus monkeys

| | | | | K/L |
|---|---|---|---|---|
| | Chemistry | Liver | Kidney | ratio |
| ISIS 532401 | 5-10-5 MOE | 725 | 2154 | 3.0 |
| ISIS 532254 | 5-10-5 MOE | 911 | 4467 | 4.9 |
| ISIS 523723 | 5-10-5 MOE | 657 | 3093 | 4.7 |
| ISIS 542112 | 3-10-3 cEt/MOE | 491 | 2863 | 5.8 |
| ISIS 542118 | 3-10-3 cEt/MOE | 429 | 1222 | 2.8 |
| ISIS 542185 | 3-10-3 cEt/MOE | 432 | 3126 | 7.2 |
| ISIS 541767 | 3-10-3 cEt/MOE | 280 | 994 | 3.5 |
| ISIS 541875 | 3-10-3 cEt/MOE | 766 | 3892 | 5.1 |

### Study 2

[0472] One group of 5 randomly assigned male cynomolgus monkeys was injected subcutaneously with ISIS 532401 or PBS using a stainless steel dosing needle and syringe of appropriate size into the intracapsular region and outer thigh of the monkeys. The monkeys were dosed a loading dose per week (days 1, 3, 5, and 7) for the first week, and then subsequently once a week (days 14, 21, 28, 35, 42, 49, 56, 63, 70, 77, 84, and 91) with 40 mg/kg of ISIS 532401. A control group of 5 cynomolgus monkeys was injected with PBS in a similar manner and served as the control group.

### Target Reduction

### RNA Analysis

[0473] On day 93, RNA was extracted from liver, white adipose tissue (WAT) and muscle for real-time PCR analysis of measurement of mRNA expression of GHR. Treatment with ISIS 532401 resulted in significant reduction of GHR mRNA in liver and white adipose tissue.

[0474] The expression of the growth hormone-responsive gene, ALS was also measured in the liver. Treatment with ISIS 532401 resulted in ALS RNA expression reduction in liver by 38%, correlating with GHR levels. ‘n.d.’ indicates that the levels were not checked in that particular tissue. The expression of IGF1 in the liver, muscle and fat tissues was also measured. Treatment with ISIS 532401 resulted in IGF1 RNA expression reduction in liver and in the WAT, correlating with GHR levels.

TABLE 124
Effect of treatment with ISIS 532401 on mRNA levels (% inhibition
compared to the PBS control) in the cynomolgus monkey

| | Liver | WAT | Muscle |
|---|---|---|---|
| GHR | 64 | 75 | 21 |
| ALS | 38 | n.d. | n.d. |
| IGF1 | 73 | 56 | 35 |

### Protein Analysis

[0475] Plasma levels of IGF-1 and GH were measured in the plasma. The results are presented in the Table below. The results indicate that treatment with ISIS 532401 resulted in reduced IGF-1 protein levels. There was no increase in plasma growth hormone levels.

TABLE 125
Plasma IGF1 levels (ng/mL) in the cynomolgus monkey

| | Day 7 | Day 49 | Day 91 |
|---|---|---|---|
| PBS | 625 | 776 | 850 |
| ISIS 532401 | 378 | 455 | 363 |

TABLE 126
Plasma growth hormone levels (ng/mL) in the cynomolgus monkey

| | Day 7 | Day 49 | Day 91 |
|---|---|---|---|
| PBS | 25 | 27 | 33 |
| ISIS 532401 | 16 | 13 | 17 |

### Example 24

### Measurement of Viscosity of ISIS Antisense Oligonucleotides Targeting Human GHR

[0476] The viscosity of select antisense oligonucleotides from the study described in the Examples above was measured with the aim of screening out antisense oligonucleotides which have a viscosity more than 40 cP. Oligonucleotides having a viscosity greater than 40 cP would be too viscous to be administered to any subject.

[0477] ISIS oligonucleotides (32-35 mg) were weighed into a glass vial, 120 μL of water was added and the antisense oligonucleotide was dissolved into solution by heating the vial at 50° C. Part of (75 μL) the pre-heated sample was pipetted to a micro-viscometer (Cambridge). The temperature of the micro-viscometer was set to 25° C. and the viscosity of the sample was measured. Another part (20 μL) of the pre-heated sample was pipetted into 10 mL of water for UV reading at 260 nM at 85° C. (Cary UV instrument). The results are presented in Table 127 and indicate that all the antisense oligonucleotides solutions are optimal in their viscosity under the criterion stated above.

TABLE 127
Viscosity of ISIS antisense oligonucleotides targeting human GHR

| ISIS | | Viscosity |
|---|---|---|
| No. | Chemistry | (cP) |
| 523723 | 5-10-5 MOE | 8 |
| 532254 | 5-10-5 MOE | 22 |
| 532401 | 5-10-5 MOE | 12 |
| 541767 | Deoxy, MOE | 13 |
| | and cEt | |
| 541875 | Deoxy, MOE | 33 |
| | and cEt | |
| 542112 | Deoxy, MOE | 10 |
| | and cEt | |
| 542118 | Deoxy, MOE | 14 |
| | and cEt | |
| 542185 | Deoxy, MOE | 17 |
| | and cEt | |

### Example 25

### Effect of Antisense Inhibition of GHR in Mice

[0478] In order to confirm the effect of antisense inhibition of GHR in the primate model, an ISIS oligonucleotide targeting murine GHR was employed to replicate the result in a mouse model.

[0479] ISIS 563223 (GAGACTTTTCCTTGTACACA, designated herein as SEQ ID NO: 2301) is a 5-10-5 MOE gapmer murine antisense oligonucleotide targeting murine GHR (GENBANK Accession No; NM_010284.2, designated herein as SEQ ID NO: 2302) at target start site 3230. A group of male and female CD1 mice were injected with a loading dose (on days 1, 3, 5, and 7) on the first week and subsequently with a once weekly dose (on days 14, 21, 28, 35, 42, 49, 56, 63, 70, 77, 84, and 91) with 40 mg/kg of ISIS 563223. One group of CD1 mice was injected in a similar manner with PBS. Mice were euthanized 48 hours after the last dose, and organs and plasma were harvested for further analysis.

mRNA Expression

[0480] Liver mRNA expression of GHR, GHBP, IGF1, and ALS were measured. The results are presented in Table 128. Antisense inhibition of GHR resulted in inhibition of GHBP, IGF1 and ALS gene expression levels.

TABLE 128
mRNA expression (% Inhibition) in CD1 mice liver

| | % (in male mice) | % (in female mice) |
|---|---|---|
| GHR | 98 | 96 |
| GHBP | 74 | 66 |
| IGF1 | 60 | 48 |
| ALS | 84 | 74 |

### Protein Expression

[0481] Plasma levels of IGF1 and growth hormone were measured. The results are presented in Table 129. Antisense inhibition of GHR resulted in decrease in IGF1 levels, and had no effect on growth hormone levels.

TABLE 129
IGF1 protein levels (ng/mL) in CD1 mice liver

| | in male mice | in female mice |
|---|---|---|
| PBS | 949 | 1002 |
| ISIS 563223 | 439 | 740 |

TABLE 130
Growth hormone protein levels (ng/mL) in CD1 mice liver

| | in male mice | in female mice |
|---|---|---|
| PBS | 3.3 ± 2.2 | 2.2 ± 1.3 |
| ISIS 563223 | 5.6 ± 6.7 | 2.9 ± 1.7 |

The application's sequence listing, which the Patent Office published only in electronic form, follows.

SEQUENCE LISTING (2302 sequences)

SEQ ID NO: 1 - DNA, 4563 bp, Homo sapien
cggcggcggcggcggcagcggcagcagcagctgctacagtggcggtggcggcggcggctgctgctgagcccgggcggcggcggggaccccgggctggggccacgcgggccggaggccccggcaccattggccccagcgcagacgcgaacccgcgctctctgatcagaggcgaagctcggaggtcctacaggtatggatctctggcagctgctgttgaccttggcactggcaggatcaagtgatgctttttctggaagtgaggccacagcagctatccttagcagagcaccctggagtctgcaaagtgttaatccaggcctaaagacaaattcttctaaggagcctaaattcaccaagtgccgttcacctgagcgagagactttttcatgccactggacagatgaggttcatcatggtacaaagaacctaggacccatacagctgttctataccagaaggaacactcaagaatggactcaagaatggaaagaatgccctgattatgtttctgctggggaaaacagctgttactttaattcatcgtttacctccatctggataccttattgtatcaagctaactagcaatggtggtacagtggatgaaaagtgtttctctgttgatgaaatagtgcaaccagatccacccattgccctcaactggactttactgaacgtcagtttaactgggattcatgcagatatccaagtgagatgggaagcaccacgcaatgcagatattcagaaaggatggatggttctggagtatgaacttcaatacaaagaagtaaatgaaactaaatggaaaatgatggaccctatattgacaacatcagttccagtgtactcattgaaagtggataaggaatatgaagtgcgtgtgagatccaaacaacgaaactctggaaattatggcgagttcagtgaggtgctctatgtaacacttcctcagatgagccaatttacatgtgaagaagatttctactttccatggctcttaattattatctttggaatatttgggctaacagtgatgctatttgtattcttattttctaaacagcaaaggattaaaatgctgattctgcccccagttccagttccaaagattaaaggaatcgatccagatctcctcaaggaaggaaaattagaggaggtgaacacaatcttagccattcatgatagctataaacccgaattccacagtgatgactcttgggttgaatttattgagctagatattgatgagccagatgaaaagactgaggaatcagacacagacagacttctaagcagtgaccatgagaaatcacatagtaacctaggggtgaaggatggcgactctggacgtaccagctgttgtgaacctgacattctggagactgatttcaatgccaatgacatacatgagggtacctcagaggttgctcagccacagaggttaaaaggggaagcagatctcttatgccttgaccagaagaatcaaaataactcaccttatcatgatgcttgccctgctactcagcagcccagtgttatccaagcagagaaaaacaaaccacaaccacttcctactgaaggagctgagtcaactcaccaagctgcccatattcagctaagcaatccaagttcactgtcaaacatcgacttttatgcccaggtgagcgacattacaccagcaggtagtgtggtcctttccccgggccaaaagaataaggcagggatgtcccaatgtgacatgcacccggaaatggtctcactctgccaagaaaacttccttatggacaatgcctacttctgtgaggcagatgccaaaaagtgcatccctgtggctcctcacatcaaggttgaatcacacatacagccaagcttaaaccaagaggacatttacatcaccacagaaagccttaccactgctgctgggaggcctgggacaggagaacatgttccaggttctgagatgcctgtcccagactatacctccattcatatagtacagtccccacagggcctcatactcaatgcgactgccttgcccttgcctgacaaagagtttctctcatcatgtggctatgtgagcacagaccaactgaacaaaatcatgccttagcctttctttggtttcccaagagctacgtatttaatagcaaagaattgactggggcaataacgtttaagccaaaacaatgtttaaaccttttttgggggagtgacaggatggggtatggattctaaaatgccttttcccaaaatgttgaaatatgatgttaaaaaaataagaagaatgcttaatcagatagatattcctattgtgcaatgtaaatattttaaagaattgtgtcagactgtttagtagcagtgattgtcttaatattgtgggtgttaatttttgatactaagcattgaatggctatgtttttaatgtatagtaaatcacgctttttgaaaaagcgaaaaaatcaggtggcttttgcggttcaggaaaattgaatgcaaaccatagcacaggctaattttttgttgtttcttaaataagaaacttttttatttaaaaaactaaaaactagaggtgagaaatttaaactataagcaagaaggcaaaaatagtttggatatgtaaaacatttattttgacataaagttgataaagattttttaataatttagacttcaagcatggctattttatattacactacacactgtgtactgcagttggtatgacccctctaaggagtgtagcaactacagtctaaagctggtttaatgttttggccaatgcacctaaagaaaaacaaactcgttttttacaaagcccttttatacctccccagactccttcaacaattctaaaatgattgtagtaatctgcattattggaatataattgttttatctgaatttttaaacaagtatttgttaatttagaaaactttaaagcgtttgcacagatcaacttaccaggcaccaaaagaagtaaaagcaaaaaagaaaacctttcttcaccaaatcttggttgatgccaaaaaaaaatacatgctaagagaagtagaaatcatagctggttcacactgaccaagatacttaagtgctgcaattgcacgcggagtgagttttttagtgcgtgcagatggtgagagataagatctatagcctctgcagcggaatctgttcacacccaacttggttttgctacataattatccaggaagggaataaggtacaagaagcattttgtaagttgaagcaaatcgaatgaaattaactgggtaatgaaacaaagagttcaagaaataagtttttgtttcacagcctataaccagacacatactcatttttcatgataatgaacagaacatagacagaagaaacaaggttttcagtccccacagataactgaaaattatttaaaccgctaaaagaaactttctttctcactaaatcttttataggatttatttaaaatagcaaaagaagaagtttcatcattttttacttcctctctgagtggactggcctcaaagcaagcattcagaagaaaaagaagcaacctcagtaatttagaaatcattttgcaatcccttaatatcctaaacatcattcatttttgttgttgttgttgttgttgagacagagtctcgctctgtcgccaggctagagtgcggtggcgcgatcttgactcactgcaatctccacctcccacaggttcaggcgattcccgtgcctcagcctcctgagtagctgggactacaggcacgcaccaccatgccaggctaatttttttgtattttagcagagacggggtttcaccatgttggccaggatggtctcgatctcctgacctcgtgatccacccgactcggcctcccaaagtgctgggattacaggtgtaagccaccgtgcccagccctaaacatcattcttgagagcattgggatatctcctgaaaaggtttatgaaaaagaagaatctcatctcagtgaagaatacttctcattttttaaaaaagcttaaaactttgaagttagctttaacttaaatagtatttcccatttatcgcagaccttttttaggaagcaagcttaatggctgataattttaaattctctctcttgcaggaaggactatgaaaagctagaattgagtgtttaaagttcaacatgttatttgtaatagatgtttgatagattttctgctactttgctgctatggttttctccaagagctacataatttagtttcatataaagtatcatcagtgtagaacctaattcaattcaaagctgtgtgtttggaagactatcttactatttcacaacagcctgacaacatttctatagccaaaaatagctaaatacctcaatcagtctcagaatgtcattttggtactttggtggccacataagccattattcactagtatgactagttgtgtctggcagtttatatttaactctctttatgtctgtggattttttccttcaaagtttaataaatttattttcttggattcctgatagtgtgcttctgttatcaaacaccaacataaaaatgatctaaacca

SEQ ID NO: 2 - DNA, 303000 bp, Homo sapiens
gccatctactgagatggaaatgtcacccactgtgattggagtatgtttaaggagaaagaaccagagttcagatgtggacatgtcaagtttcagaggtctgttagacatccaaatggagatacccagttgttagcctggagctctgtggagagatctgggttagagatataaatccaagagatacaacttttcattcaatttgattatttattggacgctttataaactctgtaaatactgggcactaacctagacattgcaggtacagatattaagaatatatagtttctccctcagaaatctcttaattaatgagaaaagcagacatgtcaacaaaactgcaatatttaataaaagaagatataaaggcctataaaggtgctgatacagggagaattaattaattccaccctggggaatagtcaggaagaccttcagagagaaagtaaacaattgattggaactttaagattaagaaggatttctctgggtggacaaagtaggatcttccaagcagagtggaaaccatgagcaaatgcagtttcattcttcagaaggtaaatgtgctctggcatgccttaacttataacaaattaatcaactcaatacctgctacattttccctcacaatttggaatatataaagaggcacatactactatggaccaatacctggtcatatatgagattgaaggacctttacttacgaggcttaaaaataaagactgcccttcatgtcagttgcaggtttatatctagttctatagtattaactgaggtgtcttttcctatgttttctgtgcatgatgactttttaaaaatcaaagacagagcagcagccagagtagtctagtttcatggcacacagaatggaggatattgctgaacccagatttaaaaaaaaaaagaagtcaattcttatttttttaagtatggccctgagctcatctcagagcataaacaatagaatttagaatatcttttatgactccgtctggcacctcctaaactagatcaagattctctagctcagggaagaagggcaaaggatgagaaggcacagagaggatataaacagagaggttggtagtgccaggctctgaagaaggtccaacttggaaggtcatttcagacaggcgtggagtcagcatttgaggcctgtctggtctctactcctgccaggactaccctgtcagccagcttggcaggtatggaccacccagcaggagtttttcttgactgtgccctaatcttttactttcccaagtttctctatatgggtacctccccttttaaaagctccagacacagccaagcaccactattgctccagcaaagtatgaagccccagaaatcaatggtttggggaagagtcttaggggaactaaatgcctccttatttttagatgccatagaacaagagcagttcaggatcaataaccatcccaccccatgataaaacacgccccttccagaatctttcctttttcgttcattctaggtgtctgtctggaacagctggggtatttgagccacagctgagcttctgaaagcattctaaggaacagtttttcacttatctgattcctttgaaaataggggtatcttatgtgatatctgctatcccagagtctttggtcctctgttccttctcaagtcttggctcccgtgtactacttcaaagccctatagatattttattctaaagaaaagaaacttggttcctttaagttgtttaaacatttctttctgggtataaacttgggtttgtgtctgggagctctgttaaaaaaaaaaagtctttagtaagccaaagctgttagaagcttataagtaagtgacattacaattgaccgtcagtaaatagtggaaagattgcatgactagctactccttcagatctgagacaacctggagctagatttttgtactctctactcagaaaagcatatagtgacttggggtttgatgctgtacaaaaatgacatgcttatgcacaactttaactttctgcaacacttttacaacttcttgtgaatgaagtaggcagggctcgcatttgacagatgagctatgtccagcgtgaggcagagttaaaacccttttcctggctcaggaacttcaggctggggcctgtgtctgctctccctgcatccctgtcctctagcagatacctctctgctaacatgctgagtgtccttggtaaattactcattctctctgtctccgtcttctaacctccacaataaagtccttcgtagttttaactatcttttcactgtgccccagtgagcaggagtttggaacttgattgttgatggaaaggcaatatttggatggctaaacacgctttccaaggtatctcgctgatcttcctctcattcctggagatagctaacctttttgtaagtgtttctttgagtctgtggactgcacttaacgctcttgtaggtcctgctttcatttggaacgggcaggcggagaggaaggaagtgtattgcaactaccaatattttcctctaggaggagccgcgcagctcagttgagagtgacacgcaccaactccagctcctcgccgggaagacttcatcccagcaactcggaatgcttggcccgggcggcactcggcctctccgcagcagttctcgaactggcctccttgaacgtccgcttcgccttcgcttctgcaacctggatctgggggactgcgggccaggcgcggcgtgacccctggtgaacggtggccgccttttcccacccctgccctcccatcctcccttcccgtttcaccccgccccctctctcctccccaagcctgacagcccgcgagctgccaagcagggcgcagccatgggaagaggaggagggctagggagcggcggcggcggcggcagcggcagcagcagctgctacagtggcggtggcggcggcggctgctgctgagcccgggcggcggcggggaccccgggctggggccacgcgggccggaggccccggcaccattggccccagcgcagacgcgaacccgcgctctctgatcagaggcgaagctcggaggtactggagtggggctccgggagtctggctttattttcctcctgttgtgccagggggcctgagggtgaaccctgggactctagttgtttatgaaaacgggaggatctgtcttatatatttacacggataattttttattccggatgacttggctgtgctcccctcctccttgcgaagaagttgttttctgctggtgggttgttgtaacccaatctagtgtgtgtgtgtgtgtgtgtgtgtgtgtgtgtgtgtgtgtgtgtgtgtctggaagttggtgagggcggcagggagttgcgggcgacagacgaaccatcacactctggcgtctgctctggcccgcgagtagtgtacgtggaggggtttactccggagacagttttgttaaagtcataaaagttttgctagtgtgtttctgtttgccatcatctgcctggctgcggcaggaactgccgaggctgctgctgttgcgcggggaagaatccccggcagcgcgactggagagactggggaggtcgagctgtgcgcgtggacacagcgcgcagagcgcgcggtcttttgcgcgtttgtgcgggccgcagccgcacgttggcaccgatggaactggggtcagtagagtgacagccaccagtccgcatgaactggggtaagtggaaattgtggcgagccgacctcccccagcttttgacacactagtggttgtaaaatcaaccaggcttaaagttttgacagaactgccagaggctgcgggtcaatggggtggccgcgtgtctagggagagggcgctggcggcgcagagggtgcggggcagggcacttgcgagtgcgtggggaagtctatttggggcgagtgctttatatatagcccgaggggatgcctgctgagaccgagctgcgggggctctcggtctggcgcggactgtgtgtcctgaatgagtgtacgtgtgcgctgtgtgtgcgcgcgcgagtgtgcgcctggggaggcgtgtcggcgcctgagccagtagggtgtgcagggtggaagaggccacagaggtgccgcctgtctgtttgtgccgccaggagaccttggaagggacagagaaaggtaacggaaggccaaagtgttgggaagtcagagtagtttctgcataggattaagtattaagggctttaaaataactaaacgcattgccctgagtggctgaggactggaagtgaggttttggggagttctcaggagaactgcatgggagggcgtttgggaggtctaagggatgtgtaatatgtgtgagtacagaacttcggagacagacacaggttggagctatgaatttgaaattttcagggtgctgctgtccacagtccagggactggctggtttcagaggtattcaggctccctggtgtgtgtgcctgggaagacactcatcttttcttgcagacatgggatattgtggcaggtcaggctctgtttcctgagcaactggtgttccaggctagtttccacctgaatcaccctagaagtgtcttttttctgatgataaatgttgaaacctttccagaaattaaaatgctggatagaaacaaaattgatgcagcagacaggattgttgattctatttattcagtgattgggagctctttttccttttgagaaaagcaaagctcagtgtttccagattagatttcaaggagtcttcagctatctacagcttcccttctgggcctttggatggagctggaaggatgtgttttggcctaaagacctttggaagacatcatgtgtagcttaaagaggttgtcccgtctctcatcatcttcttccacccttataaactttttgttttgcattaatctaaggaaagttggtgtgtcaacatttagcttttttttattggagtaaatatatcacagtgaaattatagttatggtctcctgaagcccatggaaagccaacacttaatgggcaaaggtgtgaaatgaaagtctataaatgcaatgacaaagtgacgagatgagtgcattcttttttcaaaatgaacataactgtgctcacaaaaatttgttttagccaggctttgggcccatgttttttattattagtttttaaacagcagactccacatcataaaccactttaaaatggatactagaggcctcctgtatgctatctctggcgcctgcttaaacagatgtttacagtgcttggtaacctatgggattgtcatgttgagtatcttgttagctcaggacataatgtttatagcataatataataaatggagccacagttgcagcgtgcttcttccaagtgcatgaagcaaatcttgcagcagggaaacaaatcttgcagttggtccaacttggctagccttctttggctatctcctggtgagcaatgttaatgtaaagataaatgtgagtgacgtagtgagaaagtgggacagtaaattgtttagcttagtgaaaaaagcatggattatgttttttaaatctgctaacctgaagattacacttctcaggtcgtaccactggcaaattgcacaactatgggaatttggtttgcttttaaagagcaatttttaaaaagtatgtcagtaatgaaaataacttatatttcttaatgtgtttatgtgtgtccatacaagccaatactttttcttctttaaaaagaaccctataatttctgtggtaattatttaaatattatgagcattcaaatctcctaatcaccttttcaatcttcaattgataagaatcgaagtttggtaagactggagtcatccctcagccaattgtgtaaacaagacagtacagaatgtctttctggcaagtaatttttttcaacctgaaacagataatataaataatatgtcccataaaagaattacttaagatgataattactttagaggtaattatctggtgcatgaacctctatctgtgaaaatggtctagtctatctcttattggaaataatcagttggaaatctccctttttcattggtcagtccattctaggaaagattcatttctagaaagttcttatactgaatcaacattttcttccatccacttgcctatccttcagcagctgaccacaatgaatctagtctcttttccctgtgtttaccatacttgaaaacaaatattatcctccttgccgaatccccttttgcctactcttggagcagtttttcatccactatagggttccaccctcctctgccttgaacaagatgcccttgattgtacattctcattgtattagtctgttctcatgctgctaataaagacatacgtgagactgtgtaatttataaagaaaaagaggtttaatggattcacagttccacatggctggggaggcctcacaatcatggcggaaggtgaaggaggagcaaaggcatgtcttacatgacagcaggcaagaaagcatgtgcaggggaactgccctttatagaaccatcagatctcattagacttattcactatcatgagaacaacatgggaaaaacccacttccatgatttaatcaactcctactgggtcccttccaccacatgtgggaattatgggaactacaattcaagatggcatttgggtggagacaaagccaaaccatatcattccgctcctagcccctcctaaatctcatgttctcacatttcaaaaccaatcataccttcccaacagtcccccaaagtcttaactcatttcagcattaactcaaaaatccacagtccaaagtctcacctgaaccaaggcaagtcccttccacctatgagcctgtaaaatcaaaagcaagttagttactttctagatacaatggaggtacaggcattgtgtaaatatgcccattccaaatgggagaaattggccaaaacagaggggctataggtgcaagtccaaagtctaatagggcagtcattaaaccttaaagttctgaaatgaactcctttgacttcatgtctcacatccaggctgttttcatggctggcattgactgtggcttttccaggcacatggtgctaactgtcagcccctaccattgggggtgctggggaatggtggccctcttctcttagctctactaggcagtgacccactggggactctgtgtagaggatccaaccccacatttcttttcctcattgccctagcaagggttgtttatgagggctctgcccctgcaggacaactctgcctggacatccaggcatttccatacatcctctgaaatctaggtggaagttcccaaacctcagttcttgtcttctgtgcacctgcaggaccaacaccacatggaagcttccaagacttggggctttcaccctttgcagccatggcctgagctgtaccttggccccttttagacatggctagaggggctgggacacagggtaccaagtacctaggctgcacctagcaggcccagaaaaccatttttccctcgtaggcctctgggcctgtgatgtgaggggctgccataaaggcctctgacatgttctggagacattttccctattgtcttggtgaccaacatttggcttctcattacttatgcaaatttctgcagcagtcttgaatttctccccagaaaatgggtttttcttttctatggcatcatcagcttgcacattttccaaacttttatgctcttttcacctcttgaatgctttgctgcttctaaatttcttctgccagataccctaaataatctctctcaagtttaaagttccacagatctctaggacaggggaaaaatgccaccagtctctttgctaaagcattaacaagagtcacctttgctccagttcccaacaagttcttcatcttcatctgagaccacatcagcctggactttattgtccatatcactataagcattttggtcaaagccattcaacaagtctctaggaagttccaaactttcccacatcttcctgttttctgagccctccaagtctctagaaagttccaaactttcccacattttcctgtcttcttttgagccctccatactgttcaaacctctgcctgttacccagttctaaagttgcttccacatttttgggtatctttacagcagcaccaactctaccattaccaacttactatattagcccattctcatgctgctaacaaagacatacccaagactgggtaatttataaagaaaattaggtttaatggtcgcacagttccacatggctgggaggcctctcaatcatggcagaaggtgaaggaggaataaggcactcttacatggtggcagacaataaggcatgtgcgggggaactaccctttataaaaccatcacatctcatgagacttaatcactatcgcaagaacagcatgggaaaaactcgccctcttggttcaatgacctcccactgggttcctcccatgacacatggggattatggtagctacaattcaagatgaaattggggtggggacacagcaaaaccatattactgactgtccctcctaatgtgtgttttctaaacaaaagatttataatttgtagttctgaacattctatatctattaagacagtttaatattaatgaaattctttagccatttcattacgctcttgattaatttcatacctataaacaagataacttgttcttttcagattattaatcatccatagtcaaagcatttttataatagcttcaaaacattttttcatgcctgaatgtactataaatttatggaaagtataatactgtgtgggtaaataaaattctataaacagtgcaaatagtgacttaatttctccctatcaaggaatatcaaccccaaatataccgaaagtagaatgttccaaagataaacaagttgaaactacatgttatagacaggtagggactatgatgtatttttttcataggcctcattgtgtctgcttccatgaacatgagtcagtactagcaatcaggcatttattgaaggcttgttctgccaaagtcccagagagtatgccatctggccttaaatgaagtgaaagtacatcaaataaagatacttccttgggcaactgggatttaagatgtgcatgcaggacatgtctaagtcagccatctactttttctcaggaggtaaatggcttgccaatgccacaggaaagtctaaagtgttcacactccataagcaggtcccatgtcctgttgtaggtctggacaggagctggacaaaggccctgttactcttagcttaccaagtcttagctgccttggaagaagatagcaaatctggcttatccagaggagaggcctgaagtgtgcattgggcacctacctggtgtgactgatttctcttttatgtatctgtcttgggcttccagctaaattgtgaattccccttgccaccaagctaagaatctgccacagcattgtcttcctgcacacacacacacatacacacacacaaaaacatatatgttggatgatgaagagacaatgtcagtttttcagcaagtctgaatgtgaaacaaatggctatgtttcttggtgcagtggggtgggaggatgagagagaaaaaacaaacctgtgatataaactgacatctgagcctaccaaaagccctttgagagacctttgatcaagacaaggggataatcatagtgttgtgcacttagataaaattgtccatgctagtcccgtgtgtgtgtgtgtgtgtgtgtgtgtgtgtatgtgtgtgtttcttcactttatccccagcattatggtctcaattcatacacatttgcttttttgctttattctagtctgatatgaagggaagaaataagcaatgattcagttcctttttttacatttcaaacattcatttcactactccccacctcccagtcctcaccccccaaaattacaagagacccattggcaagtacttggacatgcaattttcaaaccaaaggtttactttgctataagaaacgtctaagttaggatgatataatatgaaataatagtaaattagatgtcaagaaacttgggtcctctccaagctctgcctttaatgggctttgcagtttttgccaactatttaaccttcctgggcttcatatttcttgtatgttaaaaacaagcaaaaaggagaagtaaacaaaatgaccccttagaattctcttcagggctattgtttgaatccatttaattatcaaatttctctcttcttttaaatgtaagcatcaaaaaatgtttgcctattttattctctcatcattaatttttaatcaattaaataaaatagataaaaattttatcaaaaccatgcttcttgctttcattctaaaacaatgcaactcatcactatctgatgcagaaagtctttctgaaatattgtttttctcttttgttgttgtttttttctttgtgctaaagaaaattcattgatgagtaccaggttcttcaaagaaggatggaaaagtcattgttttttagtctcaacttctttcttcagtgcttcttcctaccttttaatataggcaaataaagccttaggccaggcactaattttacttagtaatgattcataagaaggtagtgattttgtcagaaattgctggctgcatgcttttaatcagcatctaaacttaccttcaaatactccattccaaaatcagcagataacttcttctacagagtctttcaaacttccagatgtgtttactgttttgattagggctttcttcttttgttgttgataagacttcagccagttttctttaggctaacattattatattcccaatgaattatacttcttaggttgtgaatttgtttaaagataaatctatctccagctggctggcttctaagtaaaaaggggtatcctagggaagaagtgcacttcacagggattcagtacaggtgtagagaattccctgatagagaattggaacacatcaagagtttgcaaattgaaaaggtacttttatgtacttatccatggtggacaacctgtgtcctagggaagaagcgcatttcacagggattcagcacaggtgtagagaattccctgatagggaactggaacacatcaagattttgcaatctgaacaggtacttttatgtacttatccatggttgacaacctactgtgctagacatttgctgtagtaactccttgattttttcctcggttgtttataaaattaaacatttgaagtagcctattgaaaagtcttaaaagaagcatctcctctattcctttagaatacagtatattaaacaagtgataaagtccaaagaaaaatccttattcttttcttgctttaaaaaatgcactttattttattaagcattatatctatcttttaaaactttgaattgccatatcaatgaaagtagagtgttatcattacaaaacagaatcgcagatagttctttccctgtgcttattgagagaaaaggtgcataattgatgctgtaaatgatcatcttgaatttgatgatggctggtgagaaacctcagtcagacattcaattttgattgccattggtcagaaaggcagcctttgttcttcgtcactatgtggcacatgatcctaattcaccctatcagctgcttctctgcacactttcaagctatgtgattgttatactagaaagcctctaagttggccaaactaatgaagactaatctgacaaagcatatgtgaatgataaattctgtaaagaccgtggagatagagcctctgcagtggcttcttcccctggggatagaagaagataccagaatccctgggcaagatgaaatagataaaggaaaggcatcatttttatacctaggaaatcagaaagattaaagaaagagaagcaagaataaagaagaactactactttcatagttcattctttcaatgtagcaccttatttcccatagagacattggtgaagccatgcttttctttgccatagaataggtgttcagtaaatattttgcaggtggccttaatatgtagtaaaacatacagaaatatggaagcattgacaagaagtttgtggataatttgagggcaaaaggatgtagataggatcaggttcataatgcaaatttgctattattctccttagattaatgatgtcactcaaacttcatgacctgctttccaaggtgtatgctgttcacagccttggaaacatttagaagtttttagtacttggagcaagatggatatatgtttcacattttatctaggacttagtaggacttgggagacatatctactttgccagatcttagtatacttattatggagcatgacattttaattctctttgcttttgtcctacaaagtttagtgttttaatttatttttctcggtgcatatagggagagaattatttatataatctgaaaagtactttgaaaactacttgggaaaatatgttgaataaataagtttttttttaaattagcctacaggatgtaagtctggccaggctagtggtatttttggtatcattgtgaaaaatcaaaaacagaacatgtatttatcaatccattagtgtgttcccaggaatgtgctagacactagggaattaaaacatgactcttgactttagtaccaagcattcaagctagaaggcaacactattaatgtacattcatggtgtgattatggaacagtcgatgactgtacaacttaatgaaaagttcattagagactataaatgctacatttatttagagagaaggacaatctgtttggactgagggattggaagagtggccttcatgggcaacatggctcctgagccagtacttaagatatggtattttttttttttttttttttttttggttaggtagaagggttggagaggtttcatgcaaggagttaggaactgaggaccaggaggcgtatcttgagttcactggggttactggtaatagggaggaggcagagagtaccaggctgtggatttgttatccgttggaagctcttcccattgcttattatggtcgctgcatataggctcatcccttgggtagggctattggagtggccaccctgaccctattgctgattggatagtggtggctgctgtgtggtatttcagcacatttatcttttctgaacattatgtaaattcagtctgaaaacttctttcttaaacaatgttccaagaggcctattaaagatgccaacaatatgacttccattcaagaatatgatcttgaatgggctttacaatggcagagctgacctgagattacctcctctgctcctgctctcaagccatgtgctgatgctgacagtcctggcccaatagagccatagggcctcacagaacttgagatcatctaccagtggctgtcaaccaagccactcctttctgctaggtagtgcatagggacattgggaaatacagttattataagaactggaaagagttgtaggcttttggtgcctgaagtcagaaatgctaaatttctgtgatgccaggggcagtcctatataagaaattattgtgcctcctcaaatgccagtagatccctattgaaatacttgagtctcatatcctcactttatttataggtgaggaaatgggaggccctgagaagtgacaaaactttcttctaggattaaacttcacagtctcagtgacagatttataactcaattcttttagttttctttcaagagctcttgttgcagcaccacagtccctcctattaacatgggctataactatggaatagcatgttgtttatctctgccatttttatagaaggatgatagttagctatgttaactatctgaatgggtggaatgtgaattgagataactggtacttgaccagcagttctttcgcctgggaacacacacagattcacctgtaaattagggttggcagatgcctgttgagatgtcaaccatagccaaagcttacaaattggttgactttttggaaagggcatggagtaggctttggattcacacaaatctgcttgtctgaccggatttgaatacaacccttcttatctttactatctttgtgactctcagccaattaaactctctgagctttatctgcaaaaaaacagttgattattcttatttcacaagcaatgagtcaaaatagtgcctggcacatattgggcactgcagatatagagaattccctacagtatctttttgagcataaagacttgaaaccttcacttataaaagaccctcttgataacagtcgctatttttttctcctcctttccccaaacaacgaaactagggcttcagtgagtccctgaagtgtttactttgtttgaactgttgagatttccctcctccagaagagtcctgctggccagagatgagttccttttgacttctctgtcaacgtgcctgtattattgtcacatagtaaaaatgaaagatatatctagatgattattagcaggttatgaaacttagattttaaagtcaataataaaagccattcctgggtagagaagtttttcagagagatttctaccttgccagcgatgagagagcctacttaggtgaggtgaatactttaggcaagttaagggataacacaatataatttatttaagtaagttttttatctgggactaatttcaggtttgcagaaaagttgcaaaaattttagaggtcctgtatattcctcacctagtttcccatgttgacatccataatcatgatatatttgtcaacactaagaaaccaatgttagtacagtactattaactaaaatccagacttcatcctaattcccccagagcttccactcacatcttcttttctgttccaggattcaatccagaagcgtgcactgcttttgattttatgatttttaaatactgtgcatgtgcttttttaatttgggccctctcatgtgttaaacttaccggcctttgtaaccagatagcaagttctgtaacagaaaatacaatgatgttgaatccaacatcatgctgggcacaaagtatgttctccaaactaattaaatttatcacagcaacaagaacaaagttttactcagcgtacatatgtagctgagtcctcattggtaagctaagaggtagtcataagagtgggataacttggaagaaatttgattttgaatgtgtgccctgaacattggtataaaacaggaccccctaaatcatatatgaactgagtctgtacactgtgcctagcattgtgtgtgcatatcacacttactcctgataactgtaaggcacatagccttgagtaacttagctgaggaaatgagaccaagggaagttaagttacttggccagggattcacagctagtaacacagctgagattaaaacatatgtttttctggcttcagagcctacactcctaatgctgtattcaattactcccacacttctccacttgcttaacccctattcttggtgtcctttttctaggtatacagaatttgaaaactatattgtcaaactacagcagacctggatgcatggtatacacttctttgtgagctggattaagtttcagccttgaatttgtggattattttcaaaacctgcctaacatctgtaaaacatgttgtttttttaatatgtagatatccacataaattgaccacaatgctcttcagaaagtcccataatccaataataaataaatttttgatacatggctaataacaggcacagaagcatctccaaaggacaggacattgatattgtgtaataatttaaagtattttatgattgtataatgtgcctgagttttggatagttgacctctatttctcagtctttacatagttactgcttttttaagtgttacatgagggatgtggaatattcagtgtaacatttgactaatctttatgttttgagtggcccaactgaaaattacccttggttgccttggaactctgggcatgatgttcaaaactagaaattcttgcaaattatttgagctttggctctgggaagataaacaacatgaataactaggttaaccagggctgaaatttctctaacctataattctaaattcagaaaagaatgggctttagggttttttgtttatttttgctttgattacaagttgttggaagcctagagttagtatctaataacacaatctatgtaaaacacaaattattggctcagaatgatatctaatttctaagaagatatgaggaggcaatcatgtaaaaacgtgcttttcttcctagaaggaataagctgggattggccaaaaggtaatccctttagagtctaatgtttagagcattgcatatttttaaagaagacatattaccttttagaacatatgtaggaaaccattttctttgcttatatggctacataaagttgtcatggttttaaaccgtgaccttagataccttatagaagtaattacaggcacaatctgtgaatgaagatttgcaaactatgcttcaccaagcctcagggactattggatgtccagaggacagagccatgttggatgtcttatgggccttcagtcctgcaaagtggtgtgctttcatgttttacacacagcagttctgagaaaatttaagttgaaaaaacagcctctcttcttattatttttatatttatttatttatttatttatttatttatttatttgaaacgaaatcttgctgtgtcaccaggctggagtgcagtggcgtgaacttggctcactgcaacctctgcctcccaggttcaagcgattctcttgcctctgcctcctgagtaggtgggactacaggtgcaggccaccacgcccagctaatttttgtatatatgtatttttaatagagacagggtttagccaggttgcccaggctgatcttgaactcctgagctcaagtgatcagcccacctcagcctctccaagtgctgggattacaggtgtgaggcaccgtgccgagccatcctgtcttctgaaaaaaaaaaaaaagcaaacaaaaatgtttaagcctggtatatattttcttatattgcataagctacttttctgactgcctctctttagaaattcctctgatttctagagaaaaaaaaatcgcattagctttttggtttctaaattcaggctcactttagtaactgctagattataaactcttagaaggcaaagggctatgtattctctacttgtggacactcaattagtttgcttaagcaattacttctgtgtaagcaacattaatgaagtgcttactatgatcaagggctataccaagtccttttttatattatttaatcccacacaaaacccatgatcgacctaattgtacacttggtgaaactatgatgtagggaggttaaataatttgttcaagaacccacagctggtaagtcgcacagtgtattcaaacccagatcttcctaattgcaaatgtgtccaactcccatgcttctaaccactgcctatgtgatggttctttgaaattcctccctccaagaagtggaatttaattccccccgtccattgaatgtgggccaaactcaggtgactcatttctattaaatggagtaaagtggaagtgaagatgtgtggctttagcgactaggtcattcaaagtggctcctgtcttggttgttctgtctcttatacctattgggcatttaatctggggaaaaccagctgccatgttttgagctgctctgtggaaaggctaacatgaaaagatactgtggatcctacagacagcttcaaatgaggacctgaggccctcagaccagtagccagtatgaaactgaagcctcttgaccacagcctccatgagagtaatggaatcttgaccccctagtgaaccacagcctccatgagagtaaaattcaagatggagccttgacacccagtggagcctcgagatgactgcagtcttccaccaacagcttgattcatgaaagaccatcagccagagccacccagctaaggtgattctaggcccctactcctagaaaataaatatttgctgttttgactgccaagtgtttgattaatttgttacgcagcaatagataaataatgcagcctaacactgtcctggtcatttttaaaaaagaaattgttttaattttactaaatcacaaattttaaaacattgatacagcaaggagaaactttccagaaaaaaaatgctgccaaatttaagtagtaaaatattaatgtccaaaaaacatcatagttacaatgacatctctaggattgaggattttgtaagtcaaaggtcagctgcttaaaaaacccataattttaaaaggaaggatattaataataactgcattattgaacatagatagcattttgaacttttaagaaatcctcatgggaaaactcaggaaataatctgtttggtaagttatcactcataatcttaaattgttaggtgcatgtttgcactttccatgatttgaagaggaatataaagcaaagttgaattttaacctcttccctaatgattttactcagcttttcaaaggggtcctaaaagctcagaggtcaagtcatttcttggtttgctctacctgacaaattgcattaactctgctttatagccacttgcagtttaataaatgacttggactttgattaatatctttagtgcttaagcccaagaatttgtataagactttgggatatagtactgtaaatttatctaaagatggacactggaaggtagaaggagatatattagtgttggtttgggtacatgtctaggtactgaatttggatcatcataagtccttacagaagatacttgttgacttgtcttttaaaaaatatgtgaaagtgattttttaatatatttacaaagtgatctaagtgatttaaggaattcattcatgaagtggatatgactagttcttgtttagtattcagaatgactgtaaaatagaaatgctgattttccttgcccagattgtagaacacagatcaaaccctcctagtccttcccttaaatgttttttctccatacagcttatgccctgagttctcaaaacattttttatattgaactggactgtatagtatatgcctgaccctgattcatgggattatgctgcaagggaatataaagatgaatattgatagcctgagtgtgaaaattcatcattactctcatcctcattcattaattcatttgttcattaactcataaacacactaattgattcaacagatatttattgaacgtttacactttgcccagtggagcactggactaggtgctagcatagtataataagcaacccagaaatagcctctgccttgctgcatttcatagtctaggacggagaaaggcattaaccaagtataatttaaaattgttttaagtaatgtgaaataaacatatatgagaacttgactcaggttggtatatttgatggttagggaaagcttcaaaaatgggatatttgagatctaagtaagagggaaaagaaagagcataatgggtagagaaaaaataggatccaggaagatacttagtacttctgagaactaaaaacagtcaagtcagtgtagtcagagttcaaagaaggagaaagaacatgatccaagaagaagccagaaaagtaagcagggactacatcttacacgatgatgtaggctgtattttagtttttacttatcttaagagcaatagaaaaccattgaagggtttgaagcaggggagtgacataatcaggtctgcattttaaggaggtcacctgctctattatgaagcatgaatggaggaggatggaaagagatattcagggagctggtttatgagtctgttgtaggccagaggtattggtagcttggaccagggtgatgatgctgaagattgaaaggagttaatagatttataatatatttgtgaagtaaagttgactgtacttagtgctgacttagatagtactggtgagggatgtcatggtaaactccaaggtactgggcttcttcaactgagtggaaaacactagagggagaccaggtaaaggttgaaggaaagtgaggaacagtagttcagtttggggatattttgatttggaggcctttttaagacttcctcaaagagacacagtgcagtcttgagtcctggatcagaggagatacctcaatgtataaatttgtaagacaatggtttatacacactattaaagccactgaggtaagtgagatcatgtacagagtgaaaatgaagtgagagaagaaagcataagtctgagccatgagaactccaacatttaaaggccaagtggaaaagttgacaagagtgggaattgtgactggggtagatgctagaggggcatctcagaggccaaggaaagagaatcatttaaggtgctgatgaggggtaaagtaagaaggtcctgtaaatgtcctcttggattaataaatttgatgttttgaaggactttagggagaatgagtttgttgtagtgatgggggcagaagccagaatgaagtgtcatgggaaatgggtggaagtcttgaaagagagacaatgaatatagataactcaagatatgtggtcaagggaaacaaaaaggataaggctttaactagaggaggaaatggagttaaaggaggagtttttttttttttgagacggagtctcgccatgtcgcccaggctggagtgcagtggcacgatcttggctcactgcaagctccgcctcctgggttcacgccattctcctgcctcagcctcctgagtagctgggactacaggtgccctccaccacgcccagctaattttttatatttttagtagagacggggtttcaccgtgttagccaggatggtctcgatctcctgacctcatgattcgcctgccttggcctcccaaagtgctgggattacaggtgtgagccaccactcccagccaggaggagtattttttaaagatgggagacttgagcacatttgaacaataatggggaagaccagtggggaggatcaggggtggcctgaagatagacagagggtggataaataatcatgtaggattcctgagaagatagaagaagttggatccagagcacagcagggggaattagctggccttggagaggagagatgatctctatcctctattctagaaggaagccaaaggtgatgtgtgcagatgcagaggtgtgtttgatgtggtgaagccaagtcaaaggagtttttgttcgatgccttatatctgctccagaaagcagttgagtcaccaactgagacagggagagagaaaggggctggcatactaggaaggaaaggggatcatttcagatatttgaggaggacagagtaagttggaatatgaaagggaataaatgagtgaaatttagtaggactgctagtcactgcttgaaggctcagctgaggctgatgatcatgaattcatggtactactgttagaattattataaaatatatgagcctttttggaggtgctcagcagtttaccagacacagaaaaacaggttcatctaggcttaggattttgtcagagaggtatgatgaaaagattgcaaaggagtttaggatattggcatgggcaagggagcttctggagtgataaaccaggaatctaagcctgctagggagggacatatagacaggagaaggagagtatagagatctttctgaaggttagaggaaatttgtaatcaaagtggttgattaaacaagacagaagtatagcagtcagtgatcagcccaggatgctgcaccccagatcaattaaatctgtatttctgggtgtagggcccatcccagtttctcaggagattccagtgctttccttaagggagaatattgatataactgttattaagactattgtgaaaaaacatattagcaatgtgaaatcaagacaaaaacacaaacacagaaagaagttagacaaaaacaaaaaacactgaaattacacattttctttttcacaaatcaaagtcaaattcacggaccttcttccctgactcattctccctgacattagaagtccaaagggagcaagtaaagtctttatggggaagatggtataattaagcaccaattacctagggaccagatgctttgggatttgactgatgaaaacagattagaagcatggtgaatttgttcactactgtctttttggaggggcaacactcctggctcacttggcatgaggtaatgtcagtctggctacaaagatttgaatgtggggcttgagtttctaaaaggggactgattggacttctcttagccaggatacttggacttggtggctatatcatggctcacagtgtcttggaatggtcttgagcctagttgaaatttgttgaaattacatatgaatattcattaatgtattacttggaactcagtgagaaggatcatcactgccagatttcctagttaggaaaacttaccttcattccttccagttaaatagaagaccattgtatagttcattttgggctaagtggagtgtttatgaaatgtgtagggcttataggcataactattgctaaagaaagcccagtaaagcttgacatcccctctgttgcccttgtctgtcattccataaatttaatgtcaagggcatttttagagaagatgatcacaggatgattcaggtagacatggagcaggttgtgaaaacactggcatgtttcaccaatgtattagggtttccagagaaacaggaccagtagggtgtgtgtgtgtgtgtgtgtagatttattttaagagattggctcacacaattatggagactcgcaagttcaaaatgtgcaaagtgggctagtaggttggagacccagagaagagctcatgttgcaagtcaagtccaagtccgctgcagaatttccctttgcttgggaggtcagtctttggctctattaaggcattcaactgattggagggcagtttactttactcagagtacatcatttaaaattttaatatcatctaagaacactctcatagaaacatttagggtaatgtttgacaacatatctgggcaccatggcccagccaaggtgatatagatatagatatagatagatatagatatagatatagatatagatatagacatagacatagatagatatagatatagatatagataatggatatatataatggatatataatggttatataattaaacattacacctgggaagttacagcactatcttctctggattaaacaacaacaacaaaaatactcagtccaattcatgatttgttgagggtctgtgtagaatatagaaattatactacaagtttggttttctttaggatggtgagcattttataaaatatgtatatataaagagaggcattctcttgtaacacttagaatagtcctgtacacatagaaggcacacagaatgtccagtgccagtgacatgagacttcataatgagtttgaagccaaagctttgtgtagtaaaaagccatgagcagttaataaatttccatttgatggcagctataaatattaaccagaagactcataactgtgttttcaactcacatacctgggttggggcagaagcaatagtttcagcagcttttatttatctgcttttaattccatctcaccattgttaaatttacctgaaataattgccattttgacaatgccctcaaaaatcatcttattgcctggggactgattttcagattcctgagcccagtattcagaatcctatatattccctcaacctatctttccatgtgtattttctgttgagcttcaaactgaactacctctttgctctcaacatattctatttgttaacttttgttcatgttattccctctaaaatgacttttctctaatttttttcattctctcattcttcttgtctttcgaggtggaactcaaatgccacaacgtcaaatgccacagtatctgctatgatccttcccctttccagctacaaattcctctttcctctaccacttctttggcacatttattaagactcgcgatttctctcatctaagtctcttgtgcaatgtcttactgtatgtggcctgaattcaggatctatgtctacagcctcccctttagcctcactccagtatcttgcaggtgggcagtcctctgtaaacacttgttaaaaaagtcaaaacacatttttcaaatcagaaagaacctaacatacaaagcctcattgtcatttttaaatttcatcgaagagctatacattgaattttttgtgtgttctctatagtacctagccatgtgctggacagtggacccacagtggacattcagtaattagtaatagatggatttattctgtatttaacaaaattttctggatgcttttagactgaaggagattggtttgatgacacaagtttcaaaagacaatgttattgctaatgcacattatgagggaactatgatatattttgaagtccaacaaatagaaaaatgaatcaatcacgagtcagatttattgatggaattgtgccaccatcaagtcctaaagcattagtagtgatgttatcagaaaatatcccactctgagatcatctgtagccagctttatactctaaaagaatagtctgagtatgttctgcctggaaaagggctcagtggtctaggaattattgtttttactttttcaaagtttataaacttggcatgactgtgcttttctgtggcttccaatctctggtgataagttttctcaaaatattcctgatttatcctgatgtaaatcacaattcataaatatcaagagagactgcctacagtaccatcttctgatttaaaaacacatttgaatcaatatttacttatatataatgcattctgctgaataaggaagttctgacttgttaagctcagtatgcttcgataagaaagcaaaatttttttgttgggtttttaaaatgtattttaaggtccttgtctcttggtgatagttctttacatattgaagtgccagggaataactgtccagtagctggacaagagagactcataatatggcagttgaagccaaagcattaagcaaaaacagttattaatattaacaggctcactgtagagagaagccatagttgtcaggggaggcagaactgcccaggaaacccatctttgtccttttgtctacacaggttggggcaaaagcagcagttatttgaactcagcaaacctgtgttccatattgaaggcctgcataagtcagggaccagggatgtaatgaagaccagacatggactttaggagcacaaagtgtagagataaaactgcactcataatgtaagctaatgggaggcaggaacgatggaagcagcaaagactcgctacagtgggaggagttatgagagacttcccagaagatatggcatctgagctgattcttaaaagttctgtaagaggccaacaggcagagaaaaaatgaaaaaatgctattaaacagtatagcccataaccgtggggatataccagaggatgatgtgttagggaaatggtaagtactttaaagtggctagatcagagaatgttcgagggcaggtgaagggaaaagtaggcagggttcttatatttatatcagtgatcttggactttgtctggggacctgcaggtagctgctaccagaatttcttatgtcagtaagtaacatgatcagatttgttattttagcaagacaacttacactataaagtatagagaggtgtttggagtgcactgattgaacagtagtgtggagatgtgttttttaataataaaccaaatgagtaataacatgtcttactcttacataattagtaagatcttgccagcatctttgttggatgaaaggaagcctagtgtttatcaccaaatcttttgagatgtcagtataacacaacactgtattccacttttgaaaacagccatccctatagtgtgtgaagagaatacttaaagtgcagacagacaagtgaacaccgcacttctttgtcacatgcagtcaagaaaccagacaagatatttaagctatgattattagtgttggcaagggttcagctccagggaaaataaatacattgagttagtggtggtgatgagattgacacgaatagagttgtattttccttttcatgctgttgcaagggaaatgaagctttaaacataatgaaattggttcttgtgaacagcaaatctgctatttcttcactttttatggctttgtcaacagtgatctaagttttgctttacttatttattttaaattttgttttattttaatagtttttggggaagaggtggtttttggttccacgaataagttctttagcggtgatgtctaagattgtggtgcacccatcacccaagcagtatacactgtacccagtgtgtagtcttttatccttcaccccctcccacccttctccctgagttgccaaagtctattatattattcttatgactttgcatcctcagagcttagttcccacttacaagtgagaacatacaatatttggttttccattcctgagttactttcagctccatccgggttgctgcaaatgccattattttgttcgtttttatggctgagtagtattccatggtatatatatatcacattttctttatccactcattggttgataggcatttaggcttgttccatatttttgcaatggcaaactgtgctgctgtacaaatgcatgtgcaagttgtgcaactgcctccctccctccatctctctctctttcctttcttccttccttccttcttttcttctttccttgttttctccctccctccctccctccctctatctctccctccctccctccctctctctctctttctttctttcctttctttctttcttttctttctctctctctctttctttcctctttctctagccctgccacccaggctggagtgtggtgccatgatctcagctcactgcaacgtccaacctctgcctcccaggttcaagcaattctcctgtctcagcctctgggattacaggtgcccacaaccatgcctagctactttttctatctttagtagagatggggtttcatcatgttggcctggctggtctcaaactcctgacctccagtgatccacccacctcagtctcccaaagtgttgggattacaagcatgagtcaccatgccccgcacaagtgtctttttcatataatgacttcttttccttcgagtagatacccagtagtgggattgctgaatcgaatggtatttctacttttagttctttaaggaatctccctactgttttccatagcggctgtactagtttacattcccaccagtagcgtaaaagggttcccttttcactaccttcatgccaacatctattatttttttattttttaataatggccattcttgcaggtgtaaggtgatatcacattgtggttttaatttgcattttcctgataattagtgatgtcaagcatttttttccatgtttgttgggcattcgtatatcttcttttgagaattgtctattcatgtcctttgcccactttttgatgggattatttgtttttttcttgctaatttgtttgagttccttgtagattctggatatcttgccgattctggatattagtactttgtcagatgcatagtttgcgaagattttctcccaatcggtgggttatctgtttactattattattattattattattattattattattattattgctgtgcagaagctttttaattaattaggtccaatttgtttatttttatttttgttgcatttgctttggggtttttgctcatgagttctttgcctaagccaatgttgagaagagtttttttgatgttatcttctagaattttaatgatttcaggttctagatttacatctttggtccatcctgaattgatttttatataaggtgagggatgaggatccagtttcatccttctacatggggcttgccaattatcccagcaccatttgttgactagggtgtcctttccccacttcatgtttttgtttgctttgttgaagatcagttggctgtaagcatttgcctttatttctgggttctctattctgttccattggcctatgtgactatttttataccagtgccatgctgttttggtgaatatggccttatagtgtagtttgaaatcaggtagtgtgatgcctccagatttgttctttttgcttagtcttgttttggctatgtgggctcttttttggttccatataaattttatgatttttgttccagttctgtgaagaatgatgatggtattttgatgggaattgcattaaatttgtagattgcttttggcagtatgttcattttcacaatattgattctacccatccacaagtgtgggatgtgtttccatttgtttgtgtcatctattatttctttcagcaatattttgtagttttccttgtagagatctttcaactccttcgttaagtatattcctaagtattttatttttatttttgcagctgttgtaaaaggaattgagttcttgatttgactctcagcttggtcattgttggtgtatagcaatgctactgatttgtgtacattgatttttgatcctgaaactttactgaattcatttatcagatctaggagctttttggaggagtctttaggattttctaggtatacaatcatgtcattggtgaacagtgacagttggacttcctcttttctgatttggatgcctttatttctttctcttgtctaatcactctggctaggacttctagaactacgctgaatagaagtggtgacagtgggcatgcttgtcttgttccagttctcaggcagaatgctttcaacttttccctattcagtacaatgtgggtttctcctagatggtttttattactttgagttatgtcccttctatgccaattttgttgagggtttttatcataaaagtatgctggattttgtcaaatgctttttctgtgtctagtgagatgatcatatgatttttgtttttaattctgtttatgtggtgtatcacatttattgactcgggtatggtaaacctacatccctggtatgaaaccactatatccctagtatgaaacccgcttgatcatgatgtgttatcttttttgaaatgctgctggattcagttagctactactttgttgaggatttttgcatgtatgttcattagggatatttgtacttttagttttctgttatgtcctttccaagtttaggtattagggtgatactggcttcatagaatgatttcctctttttctatctttttgaatagtttcagtatccaattcttctttaaatgtcagatagaattcagctgtgaatccatcgctcttggactttttttgttggcacttgtttttttattactgtttcagtctcactacttgttattggtctgtccagagttcctgtttcttcctgatttaatgtaggagggttgtatatttgcaggaatttgtccatctcctctagattttctagtttgtgtgcatataggtgtttataatagccttgaatgatcttttgtatttctgtgatatcggttgcaatatctcgtttcatttcttattgagcgtattcggatcttctctcttcttggttaatttcactaatggtttttcaatcaattttatttatattttcaaagaaccagctttttgtttcacttgtcttttgcatttttgttgttgttgttgttgtttcagtttcatttagttcttctcttatttggttatatcttttcttctgctttgtttgggtttgtttttttcttgtttccctagttccttgaggtgtgaccttagattgtctatttgtgctctttcagactttttgatttaggcatttaaaactatgaaatttcctcttagcatcacttttgttgtatcccataggttttgataagttttgtcatcattatcattttgaaagaatttttaattttcatcttgatttcattgttgacccaaagatcattcaagagcagattatttaatgtccatgtatttctatagttttgaaggtttcttttggagttaattttcatttttattccgcagttgtctgagaggatacttaatatgattttgtttttcttaaatttattgagactcgtttagtggcctatcatatggtctgtcttggagaatgttccatgtgctgatgaaaagaatgtatattctacatttttaggtagactgttctgtaagtacctattaagtcaatttgttccagggcatagtttaagcccattgtttctttgttgactttctgtcttgatgacatgtctagtgttgtcaatggagtactgaaatcccacactattattatgttactgtctatcttgtttcttaggtctagcagtaattgttttattaatttgggagctccactgttagatgcatatatatttatgattgtgatattttcctgttggactaatccttttatcattatataatgtccctctttgtctttttttttttccactgttgttgctttaaagtctgttttgtctgatataagaatagctactcctagactggccgcagtggctcacacctgtaatcccagcactttgggaggccaagatgggcagatcacaaggtcaggagttctactaaaaatacaaagaaattagccaggtgtggtggtgtgcgcctgcagtcccagctactcaagaggctgtggcaggagagtcacttgaacccaggaggtggaggtcatagtgagccaagattgcaccactgactccagcttgggcaacagagcaagactctgtcaaaaaaaaaaaaaaaaacctactcctgctcacttttagtttccatttgtgtgaaatatctttttccacttctttaccttaagtttatgtgagtccttatgtgttacgtgggtctcttgacaacagcggatacttggttgtcggatttctctccattctgtcattctgtatcttttaagtggagcatttaggccatttgctttcaatgttagtattgacatataaggtactgttctattcattatgttagctgttgcctaatactttttaaaattatgttattgctttataggccctgtgagatttatgctttaagaaggttctgtttgggtgtatttcaaggttttgtttcaagatttagaacacccttaagcagttcttgtagtgctgatttggtagtggcaaattccctcaacatttgttagtctgaaaaagactatctctccttcatatctgaagcttagttttgctggatgcaaaatttttgactgacaattattttgtttaagggggctaaagataggaccctgctcccttctgattggcaaggtttctcttgagaagtctgctgttaatctgataggtttttctttataggttacctgatgcttttgtctcacagctcttgattttttcctttgtcttgactttagataaactgatgactgagtgtctaggtgattatctttgcaatgaattttccaggagttctttgagcttcctgtatttggatatctaggtctccagcaaggccagggaagttttccttaattattcccttaaataagtttttctaatttttagatttcacttcttcctcaggaacaccatttattcttaggtttgactgtttaatatagtcccaaatttcgtggaaactttgttcatttttaaaaattcttttttctttgtctgattgggttaattcaaaagtcttatctttgagctctgaagttctttcttcttcttgttctagtttgttgctgaaactttccactgaattttatatttccctaagtgtatctttcatttccagaagttgtggatgtttttctttatgatatctatttctctggagaaaatttcgttcatattttgtactagtttttaaatttatttaaattgttttttgcctttttctggtaactccttgagtagcttaataattgaccttctgaattctttgtctggaaattcagagatttcttcctggttcggatccattgttgtggaactacagtaatctttgggggttttatagaactctgttttgtgatattaccagaattacttttctggttccttctcatttgggtagactattacttaaaattgtttttgtggactgtgttttttttttaatttcttattttttctttcttaagaatcagactctaatgtttattttagcctaattggagtcttggtgcttgtaggggtgaagactctgtacgagatccttagttacagaatcttcctgcactggttttccccaatgctgattttagtagttacatacttggtgtgtgggtgaattctctgtctcctgtgaagctggaatggcagggatcccttgacgcttatgtcctcctctcatggtatacagtttatttactggtcttttatttactgagttgatgattcaggcttcaggacaattggggaggtatcccccggcaggcaccagttgtggctaaggcaagtgggtagatgtaatacccaatggcgagccgaggtcacagccttgatgagggtggctggaggagctctcaattaggtgtgctgaaattttatcaaggtgaaaagtgggagcttcctcagctcccctgccaagtcagaaagaaaactattcacctcacagcctcactcctgtcctagcatttcagctattcagatcagacaggcatctcttttcatctataggaatgttgttgttccaagtagggaggaactgtgactctgcctctcatgcaggcctgaatctggggtttgctcctcttgtgggcgatactcaccctggagtgttccagaaaggctgtctacaggtgtatccatgtgtgttcctgtgggggaagccccagctgtgtctgcagtggagtgccagggggaacaaggactccttttccaaggcccttcatggtcacagaggctgcttgcctattggggtataggtgcagactttccctactgcacctggcactgcaattgggtctctgctgtgagaaactacccactagcagaaagatctgaaactcctactattcagattattttgtctcacttagtgattccttgatgtggtgttctcctctttcccctagggatgggcttcctgagagccagattgcagtgactgttattgttcttctgggtctagccacccaatggagttaccaggctctgggctggtgctggcgaatgtctgcaaagagaccggtgatctgatcagtcttcaggtctcctagccatgtataccagcacctgctctggtggaggtgacaggatagggatgtagactctgtgagaatccctgattgtagataggtgtagtgtgctggctttctcaaatgctagttatgctagtattgaagttgccacgtggacagactaaggacctctggttagccaggatgttgcaggcagtgatattagctgttgttttctccttcctgggagcaatattattgtcatgagtatggcctgagttggttggcctccagccaggaggtggtgtcttttgtgttcggctgccaaggcagatagaaaaataccatcaagtgggggcaggattaggcgggtctgagctgagactcttcttgggctagtcttgccacagccactatgtaggatggggaggatggttttcaggctgatggggttatgttccagaggggattatggctgcctctgtggcacagaatagttcaccagggaagtggagaatagccagtagtgaaaggcttcacccagctcccacacagttggtgagcccaatctcactcttgcaatgctgtgttaacagcaccaagtttagatccacgcctcctgcttgtggaactcagtcttactccaggccatacacttccccactgagaaagcaagcaaggctttcaggccacacccctccctgtctgcccacaaggttcctgtgctcatatctgctgcagttcccattcacccaccagattctgttcacgcaggttcatgccccctcaaaattatcacaaaattcatttggaagcttctttcaccttgtgccccctccctaattctgctggctgccttccctgagggcccctgtgagatatagtcaggcatggcttccctgggtttgagctggagactgggagtgcctacaagactcttcctgctgctgcttctacttttgtgtttcacgtggctccctaaatctgttccagctctaggtaaggttaaatccttctctcatgatctggattttcagattccccagtgaggatatgtgtttggaggcaggttttcccccattcacactttgggaactcattgctttttgcctgtctcacagagtttgcagcagcctgtcacttctttcaaaggatctgtgaattctttccattttcctgatatgatcctgtggtggttcttggaaaaaaggttcacagtctgagtctccacacactgttctgtccatccaagcaggagatgtatgttagccctgcctgctatctgccatctttcttctgtccccaatccttctctttagatagctgagataccatcttttgtttcttctgacttggttctattcactgacattcctctctatcaagtagatttttgaactttcatggaaatttattcccaatttatatggaaataattcccaatttatatgaaaagcttataaagtgattcattaaccaagtatttactgaggtgctaaaagtatactctgaagcaggagtggcaagtcctttgccttcatggagattgcattctcttgtaaatcttacatgatggtcactagatttaggaataaaggactccagcataaaacactgacacttctgctggagaaatattttacaaactatatatattgaagcccaaactctggtttattggtaaaggagtagcactgatactagaattttgtgatcaacatgttggaataagaagtcagaagacttagatctgtgttctttttctcccgctggctataggttgctttaatctctgagctgcagtttcctcatctacagaataggttagaccagattagtggtcttcaactttggctgtatattagaattatcttactcttgaccaattaggttagaaatttcgggccacacacaatggcttacgcctgtaatcccagcattttgggaggcagatacgggcagatcacaaggtcaagagatggagaacatcctggccaagatggtgaaaccccatctctactaaaaatacaaaaattagctgggtgtggtggtacacacctgtagtcccagctactcaggaggctgaggcaggagaatcgcttgaacctgggaggcggaggtggcagtgagccgagatcgtgccactgcactgcagcctggtgacagagcgagactccgtctcaaaataaataaataaataaaaattaaaattagaaatttcctggtggagaggaaagcagaggtatttttaaagctctcaggtgatatatttctgttttaaggtaggactaaaaatcatgggactacgtcagaagttctaattataaatctataggttagttttctccaggcatgggtatagtgcttaaatgccttttaaatttgttaccaacatagaaaaaaaaaggtttccggcttctcttgaaaaatggaaatattaggcaacagttgggcttatgtttctgagtggtaaaaattaaacaaagtaaacgagtctccgtttcatttgttcctgttgccttcctggctcttgaaggcattgtcatttgtgaaaactaaactagatggtctttaaaatctccaattatttgaattgcttatttccacatccagaaaagagacggtaaacaaactatacctttatctgtaagctagttggtttgtgaaatcaaagggaacttaatctttgaatatggaaaaatcccagggtccaatggaagagaaactccatctcattaatagcaggactccacagactgctatggaaaagacacccacccggggctaagagggagggaggcggaagaggacttaattcattttctgggcatttttaatgaagctttcccctctttcattatttcttatttgggagctggatcattagttgggatgtgactggctttccctggggagcaaaaaggagattaacagaggttttgctcgcttcttcctgtgatttactgtgggaagtctcccaggttcttcccttcgcttctctgtggccttcatcttcatggtttcttgctgtgtctctctgagagcaagtacctgggtgaaaaaggctgagtgtgtggttttttggcaactgcctggcattggatttaagtgggtatatttgaattactagaattttacattttataggttcaaaatatgcacttgaattctgtaggacctcttacccaaattgaataatcctttgtgccttgttaaattttaaaaagtcacactatcaacattatgacatatggcatatatgatggcaataataaaaataacacacttattgtccactttaatgtgccagcagtgttccaagtgatttgcgtaaatatcaaatttgttccacacaattatcctatgaactaaatgttattatttcctggtttataggtgaggaacacagaggctcaaagcagctatttgatttctcttatttcaaaattaggggaagtgagatacattaacctgtataaccagaccttgttaactgtttttggtaaattccaatgtgtattgattttcacaaagacaaatcacaccattgttatattaaatattaattttttcatagtccctcaaggtgcttactggctatattgttactgtcttttgatgttgtttatacatggtggattacagaattccatgaacataaaaaatcttgactttatcctagcctatttcctattcttaccccctgcaaagtaaaaagttcaaaatagcgttagtaagccaagcaaactacttactagccacatgaacctactagcctctctgcctcagtttctttgttgggaaaatggacaatacctaactcaactcataaggatatttctagaatcaggtgtaatatcaaataaaaatatatttcctttttcctagaagatacccatgtatatcttaggtactgatgtattcatagtgatgcagaacataaaatgtttattcttttgcttagcaacaactatccatagagatttttccactttagagatttaatcccattaaaggtttttagattgattggacaatgagaatgtttttgtctctctgaaactgaggctgaaagttgatttcattctctcacttcaaatcatactacaaggctacagtaaccaaaacagcatgtcactggcacaaaaacagacacatagacaaatggaacagattagagagcccagaaataatgccacacacctacaacaatctgatctttgataaagttgacaaaaacaagaaatggggaaaggactctctattcaataaatggggctgggaagctagctagccatatgcagaagattgaagctggacccctccttacaccatataaaaaaatcaacttgagatagattaaaaacttaaatgtaaaacctaaaactataaaaaaccctggaagataacctaggaaatggcattctcgacataggacctggcaaagattccatgacaaagatgtcatgacaaagatgtcaaaagcaattgcaacaaaagcaaaaattgagaaatggaaacagattaaactaaagagcttctgcacagcaaaagaactatcaacagagtaaacagcctacaggatgggagaaaatatttgcaaactatacatccgacaaaagtctggtattcagaatctataacaaacttgaacaaatcaacaagcaaaaaacaacccaattaaaaagtgagcaaaggacattaacagacatttttcaaaggaagacatacatgtggccaacaagcatatgaaaaaatgctcaatatcactaatcattatggaaatgcaaatcaaaaccacaatgagataccatctcacaagtcagaatggctattaccaaaaagtaaaagaaaaacagatgcctgtgaggttgtagagaaaagggaatgcttatacactgaaaagggaatgcttatacactgctggtgggaatgtaaattagttcagcaattgtggtaagcagtttggtaatttctcaaagaactcaaagtagaattaccattagacccaataatcccattattggatataaacccaaaggaatataaatcgttttaccataaagacacatgcatatgtattttcactgtggcactataacagagacacaataacaaagacatggaaccaaactaaatgtccttcaatagtagactggataaagaaaatgtgatacatatataccatggaataccatgcagccataaaaagaaatgagatcatgtcctttgcagcaacatggatgaagctggaggccattatcctaagtggactaacacaggaacagaaaaccaaataccacatgttctcatttataagtggaagctaaacattgggtacatatgaacacaaagaagagagcaacagacagtggggcctacttgtgggtagagggagggaagaggatgaggattaacaaactacctatcagatactatgcttattacctgagtggcaaaataatctgtacaccaaacccctctgacatgccatttacctatgtaacaaacctgcatagtacccccgaacttaaaagttaaaagaaaaaaaaatgattaatgagcgtgataccagaacaatattatgatgcagggctattttttgtgtgtttgctagctgggcttgagatttgataaataagtcccattgtcctaatccgctagtgatgatgttctagcctttgaaattcaaactactactactccactttgagagagactgcatgagaattggacccagcctggggctttagacaccatggttcaaatcttggctcttatcattttttagccacgtgtcatggactcaatgtttttgtctcccagctccccagattcacaggttgaagccctaacctccaatgtggctgaatttgagattagggcctgtgaggagctggtaaaagttaaatgaattcttaaggataggtctccaatcctatagagttggtgctcttacaagaagaggaacagacacccgagttctctctctttgctatatgaggacatggtgaggagtggccatctgcaagctcagaagagagccctcaccaggaacttaagtgtctggcaccttgatcgtggacttcccgacctccagaactgtgagaaataattttttgttgtttaaatcacccaaactgtagtattttgttgtggcagcccaagccaattattataccatgtaagcaggttacttaaatttactaaatatgtaagttacttaaaatttcaaatcctggttctaactttactagctatcacttttactagctaacacattacattttcttcaacttgccgcatgcttttgctgtgagttttaaatgaaattgcttaagtactttgcttatcatactgctgatccatagtaagcacttaaagttagtttccaggaagtttggaatggatctcacttatgcaaatggttgactttgacggtgcttgttcctctctggaaagggttcacctcccattagaatagtcctgtgactgcagtaattttgtatgttaaacttacatgtatatctgcagaatgttaaatctgcaaacaccatccatcaacccaaaagcaaaaaaagagtgtttcctaatagttaatagttggtagcttaataggaaatctagaaaaaaaatgtttaataatgaaggctatattaataccaagtctcatttgagttcctgtcagtaaggaaatagttatctttcgttgttaatcaatgaagaccagttgccataattagggctctggtgtgttttcttcacatggtcttctaggacctaatgtaatatcatttgagaggctcaaagaggatcccatattcccaaaggtatcttagagtccttagctgcccaacatcccaccattaatcatgctttgcagatgaaaaattgaagactccttgtctctgaatatctgggatatgctttcattcctaggatggacatttttcttcttccccaataaggaagaaaaagggacagaggtgatttataagagcagttctactgagtgaaatgtgggtcctagcaaaggaggacacagctgccccttgtaatagtggagggaaggaaggaggcaggctggctgtactttgccctcctcaaccctaaaccctatctgtttaccacagtggaccttttttctgaactctaacctcattatttcattcattatccacgtaatattcattaatgttctccaaggctcttagaataaatctttaacatttccccaaaaagtcacaaggtctgacacctgccttcctttttccagcttcctatcataatcctcctttttggcagtggccacactgatcttctttcaggttcccaagctcagcatttgcttttcattgggagccccttacatcatgactgtcagcctgattgtcatttctttggggaggccttccctgaaccctggaactggatcatatacccctatcatgtgctttcatagcaccatgaatgtctccttggtggcagtccccagtaggagaattctgtgtttatctgtatggctgtttcataaatgtttatcttcctcccaatagtctgtcagcactttggcagccagttgtgttttgctgttgattctacctccagcacagaatgtctcttagtatttatggaaggggacatgaaaaaagaaaaagtccactgcatgaagatttaatccagcgacactgaggcctgaacatctagctttagggaagccagcttctagcaggacagactggtagggactaggtaaggagaatggaaaaacacagggaatgagcatcactttctttaagactttgcctctggcagacccctccaagtaacagattccaaagagattgtgaatgttctccctctggtatgcagtctcctgtcctgtcagaaacatggtacccagaggccaaagctgctgcataagcaagttatcatgaaactattccaggacaggtttcagaagcagggtcttaaaaatgagtattaaatctaatgttcacccagatacatttccaacccacatatagacaccgaatttaacgatgaaagtggaagttactctgttgaggatttatttgaaatgttggttttctcttgtccatctgatacaggtcatagctctgtttctgtcattagattgattttcatgtttctcagcacagactctctgtgagtcagagataagtttaatttttcagcatggccataggaatgatgaagtcattcctcattaaaatgaagctaagcaaaatttaatagtacttgtttaagattccttatttacttttctacacaaaaagagttgcaaggggaaaacaaaaactttagctttgagtaatttccttaattcaaatatagatttaaaccactttgtcataatatgtaaatgaactattgcttttttcaccacaggtctgttttcaaatagataatgagattatataaataattaccttatataaacataaggttactcattattgaaagcaattttctttttttgtttctggtttattatggttaagagtgagcctttgttttagatatttgaaaacaaaatgtgtgtgtgcgtgtgcttttgtgtgtgtgtgtggatatgtgtatctagggaggtcctcaaattcaaaaattataatacaaggttgtaatgtcagcacttcctattgcatagttttataatggggatatatagctatgcattaaaatgcattattgaaatggaaaatcaggatgtgttaaaaatgaattagtaattatattaagatctgaatgggaactagcatacaatgtaacttaagcttttgaaaaataaaaaaaaacagaaaataattaatgataagttagtttcagtattacattgataaatatttccagaataagctataaaaaataaggaggtagatttattattttaaggttcatactaaaagattgtaatatttacttaacctttctttatttaatttagaataagattactgtcatctctctaagcatctatgtaatagtgttttatttacttttccattaaatattactgagataaataaggagtcctggtgaatgaaatataatttaataagcagagttttcttaggtgaaaactaatcatgtcctgctataaatgtatattgagagagaagctgaatagacaagctccatgatttagtcaatgatacgacttcagggaaaatgtttttatgccttgttggccatatcttttaatacttgcattgaaaataaaattacatcccaagattatgagggttgtgaaattttataattagatatttaagtcctgaattgattagcagcagtataaacatagacatggattttgggttaaatctgagaactatttttttgtactaaaatttgcgtgcagatgacaatgggaaaatcaaatgttttcctggaaaattttcaaatgggacaaatagtcatctttctggaaatatgaaataaagggagtggtagtggttggactataaacctctttgaaggccttttaatctttagctgtaattcatgttttatcaccattggattttcaaaacggaaaataccttagaaataatttagtgggccgggcgcggtggctcacgcctgtaatcccagcactttgggaggccgaggcgggtggatcacgaggtcaggagatcgagaccatcccggctaaaacggtgaaaccccgtctctactaaaaatacaaaaaattagccgggcgtagtggtgggcgcctgtagtcccagctacttgggaggctgaggcaggagaatggcgtgaacccgagaggcggagcttgcagtgagccgagatcccgccactgcactccagcctgggcgacagagcgagactccgtctcaaaaaaaaaaaaaaaaaaaaaaaagaaaaagaaataatttagtgttaccttgttgatattaccaaaaaaaaaaaaaaagtgctcagagtcacataacttgattcagtcagagctggtactagatgctcagtcttctgacttctaatttagtttgctttcattatctacttactacctgctgctgactcagagctcctcagctatctgcaagtggatgtgtttattgaacatttacgatgtacatgaactgctctcaatgcgaagctcccatggtgaatgggagcttactttctgactcaaaaattagttttctctctttgtgttctaaatgaaagtgtccttttgctttatctgaagcagaaagttgtaagtttgtttattttacttttgaaattttggagaattggcagtggggtcatgccatcagaaacacatacatgcaatgcatggatgcacggtgtgaatgagctctctggaagatggtagattatgggaaagaaggaagctcagaaagagagtggaccaagtcaagaggaaagagagaagaaacaggcaagtgtggagcagaggaaaagtaggagggtcatgaatccattctgcaggtgtgtgctgagtgactggaagaaggaaaagaaccaaggaagtctctgccatgttatcttagttttgttaagggtataaagagattgaagagagtttaactaggccatctttaaccctaggacatccctagagtccctggcagaactaataatctaaattatgaatggctgtgtgtgcacacacacaggatgcacttactaatgtctatcattatgagtatcttctgacttctccactacaaagaaaggaagggaatgtgaccctctttccaggttagaagtaactagggcatagtaacacaaatggatgaattaaactgtttaaatggtgcactggaatatatttattttggggcaaatcatgaagaaataaaaaaggaagagattctcttttgagaaaaagtttgtttcctattgtcaattgagcaactctgtgaacatcttaaagataaagaatgattattctgtaaagtgctgggatttctggtgctgtgtgacaaagtccggttccttttgtctaagttagttataataatctttaatgaaaagcagaggggtcccatggtttggaacaagtatctgagtcaagagttgacaagtagaatagctgggcgcagaggctgctgtcaagttgacaaagccagaacagtacatttggacagaaagaatttgattttcttatactgaatgtgatgatcttgaagaacagattttttttttgcatgaaaataaatctttattttcagttattacccaccagtaagagaaagttaggttaagggtataaagggattgaagaggtttctacttttgcccagtccttattttgaatagccttccactcatccaaagtcatctcttttggaccctcctcttttacctcttcaacttcattctccttattttcagtgtctgccactggatgatgttcttcaccttcaggtgtttcctcagtcacatttgattgatccaagtcactgcaattataagatatttgtttctgaatgtatttgggggactctgttaattcatctttgacaattccccagttgtgagatctgctacctccacgttacaggtcctcgtgcttcaggccactgtaatgtgaaaaaaaagatctatcacttccactatacctatcaaattcacgtttgccacgagaatcaaatccatctccttggcccatttcacgtccactgccctctcgacctcttccaagaccaccatgaccttgaataggtcggtcaataatcagtctatcaactgaaaattcgcctccttcacccctttcatcaagtggcttttcaagtcttcgttcacaaggtggtctcctttctggtcttctatcagttattttcccttcaccgtgaagttgttgagcaggtcttcttccaacttgtcttattccttcttctttttgtgttttttatttttcctctaggcaagctttattctttgattcctctatccaggaagggggctgttggttgcatcttacccaaatggaatgcaatgggaattgggagcttgagttgtgtggaggaggagttgtcaatcttaacaaatgactatagctggcgtgtggtgtccatcaatccttgagggcttggccatgcacactagggaatggtcagaacagactcaacagaggtctccagagctttacaatatctacaatatcaaggttcagggggtatagacagtaaggaaaaaggccatttcctgtttctgtccatttttggtacagtagacagttaaggttttttcttttgactagcttttaaaaaattacttagaaaatggaaagcttataaacattcataagtgaattgttgaattgctaccccaagtggtttccttacctagtcaccacttaaccagaaatactagaatacacggttcaaccagaattcaaccaggcagataacctgcctattgctcaagcaatcatcagagtttttaaaaacaaaattaagcaaaaaagacctttccccaaatacaatcattactttgtatgacccattcctaagaaagctacattccatttcagaaaacatgaccacttaaggtacagttaaaacaaagtcgttgccttcaggtgcttactttctgttttctttaaattaactgctgaaatgtttatcttgtgttttgtgctgcattcctgaaaactgtaacttttaaggacataggcctcatctttataaaggaagaagaaaacagcaaagaggtgtctcatttgggaggcagaaggttatgaccaatgctggaagtcttcctcttccttacttgttgttcaacaagatgggttctgtggtgtcgcatgaggtgtgagttggaaatgaaagctgcaccacacttcttatattcatagggcttctccccagtgtgggttctctggtgcaccgtgaggctcaacctctgtctgaaggccttcccacactcattacacatgtaaggtttttctccattatggattctctgatgaataagtaggtatgagctacatgtgaaggccttcccacattcattacacacaaaaggaagatctccactgtgaattctctggtggacaaaaaggcaagagagctgactgaaggcttgcccacattcactgcagtcataaggtttctctgcagtgtgaattatctggtacataataaggtgtgaaaaacaactaaaggttttcccaaactcacactcatatggcttctcaccagtatggcttcgctgatgtacaataagatttgcaatctgcgtaaaggctttgccagaatcgttacaggcagagggcttctccccagtgtggatcctctggtggacaatatggtttgagctcccagtaaatgttttccgacactcattacatttacagcatttttctgtaatgtggagtttctggtgccgagcaagttgtgagctataactaaaggctttctcacatttactacgcctaaaggttttttctaaggagaggtttttttgatatacagtcagatttgaactctgattgaaggctttcccacattttgagcaaacataaggtttctgtccagtgtggattctctgatgcacatcgagctttgcactctgaatgaaggccttcccacactcatgacattcaaaaggtttctccccggtgtggattctctgatgcacaacgaggtttgcactctgactaaatcctttcccacacatgctacaatgtaaaagactttcgcccaagctgggttttcggattgttaacagtgtcagaattaaggctgtattttcccacagatttcttacatttctggtcttcctcttctttgaagctttcaggtaagtgacagtcattcactatgacttatctgaaatctttcctttccctccttattctctgcctctttaacatgttttctttttcacaagcctctcttaactcaggtccttaaggatcagctttctggattcttcctaatatgatgcgggggttttcagcttcctcacgtatctcagtttttggaaccagtaactgaaggttcttggtttcagcaccttttcttcctcttctgatccatcaaggcctgtctgacgaaactcccctggggcccagactttgatgttctcagagtgcacttgttggctggatgcctgatctgggaagttttcttcttcctcctcctcctttttcaccttcactgggcggcatgggcctagggccatggcttctctcaattctgcagtcatcttctctgctcagcaggggaacgcctatagctgggagctgcccagcacaggtcaaaccccatctaagctttatgtttcaaaagcttcttcttgagtttcctcccagggccaagatgagtattgcctacgtgcgcagctgagaggcccgaccagagttcactggctctgcagcaggaggctgggggaccaggacctcagctcctactggcacgagaacaatgacccttattccttctttcttaagcaccatggacggctgcgtctcctctttcctgtcaaccacgccaacgctggagggcagcgggttcttgctgtctttctgggactccttgcgcagctagctatttgcctgccgccttggagttggtctgggtcgcagcctgagctgccgctcttggccccagagacgccgcccccgccagcttcttttttcttgttctctcctgccttcagcacctcgaaggggtccgattagttgtcaaataactggtcgaatcggttggtgaccaggcagctgaagccttcctgtaactgcccaggcatgatggttgctcggcggcacattcctccacggattgcagcgggctgcgccgagccaagagcgcgtgcttcagctcttcccagaagatcgaagaacaatttttttgaaatccgcctgtaaatgtcaggcaaggtaaatttcaaaatgaatttttaaagtctctaaaatggagttatgtttaattatgactttatgacaaattaaaagatagttctagataatactattgtagaaagaagcttctcttgttctgggaaagagagacagtttggaaacttgagacaagacccttattgtctgttttattatttactgctaacaaactgcattctctcactgttcactggaataggtgggtccagggaacttaggaaagcctaatgggaagtgagaaaagtaaattatttcttatatttttatgtatacaaatagttgataaaggaggaagtgtagtggtggggtggatcatgcagattgggatacaagagacagtataattattcacaattatagataaggagatctaggcttcacattttcacttctggaatattccactttgacagaacagtctactgtctgcctcagcctatcctggagatgtccttgtggtgggagaggacctgctttctccttgctgtgctcctacagtttgtctctgccagtcatgtccaagccccttgtcttagtgcctcacaagacctcttcctctgaccaggattcaggcaccttctcagaaccttcattcccctgacagcaggaccagccagtctcccagacccggggtagtgcgaagaggagagcagactccttagacccagagtcccaggacacttggcctcaattcccgtgacacctatatcacccagacaactgggaaatggaggtgctggtgccagaacaaaagcataagctgtgtttctcaagtttggactttacctgggctgttgctttattttctagctgtttactgatttttagaagcataaaggtttctttctgtgaagttcctagggacacttaacggagtggggacaggtattccttttgtctttcagaaaggcatgttaagagttagtctcacagtaatttaagtctcacctcctaaatggggtaagagtggggagaaatatatgtgtgtatatttgtgtgtgtatataaataatatatatatactactaatataattaataatgtgtgtataaataatatgtaaataacatattatattatatgtcaataataaaatattatattaatatatgttattacattaatatactatatattataatatataagatataattatatattatatactattatattatatctataacataatatattatatatttatatatcattatataatgtattacatgtattaatatatattatctatatagtaaatatatggggtgtgtatttgtgtatacacacacacacgcacatatatatcctgcattgtttgcttagaatcatgctttgcaattattaactgctttttcttccttcccttcatctaatacacctgaagaatatttcagttagccaaaggtgagaatccgaattcatatttgtattcccaatagatttcccgcagaatcttgggttatcatttcatcaataacagttatgcagatgttctattgctgtgtccaatgcttgcttcgttcatatgaaatttgacttttggccattcaaaaagcaatcagtgccttcttgttgattagcactaatcaccacaagatccttccaatagtaaattttccagagcaaaattctaaacttacagattagtttgccgcagcccctagccctacactgtaaggatcttgctttccatgaggtccattgttaaatggaaatgttcccctggctctatgcagtgctcaggtgtttcttactcagctgaaggactaatgaatttagtttgaatctaaatttggagtaaaaaatgccactcaggagagctgcttctgtgactgcattgccttccaacctgcttttccatttttccttattactccatgtccttgaggagtttattcctttatagcttttgtgatctggctgtaattattttgaaaaaaattttcattatactggacattttggattaagtcctccaaattttcttatttgtgagagtacaagtcactatttacactatggtaaactgcatgcaaacatctgagtacctttctgttcctgtcttcagctgggccagcactaagctggaatagcctatactttgatgtttttctgaggaagtacattttccttttccctcagattcctggtgcctggtatagcacttttttgatttgctcttgttctggcaataggtcaactggctttcatggtccttaacgtttcaggtaaataattccaacagttgtgactggaaggaattcaaatcaactcaaggcatccactctatgttcaaaatgccatgttttgagtgatttgtcctttggttagtaactttaaaaaatatgaggactggaaggagaagctactatttgaggaactaatggaaaatcaagcagtttttgatgtactaacatatacacttatgatgcaaggagtgtgatcgttgaccttcctacttatctaaacattatgctctcagagcatgtggataggtagcatagcctagtggttaacacacatagaaaagtcagactgcctagttcgaatcccagcttcatcacttgctagctatataatctttattaaattagttaactttcctgtgcctcagtctggttttcctgaggattaaatgattttatatttgttaagtgcctagaactgtagctggtctgcaacaagtactatacgtctttgtttaaataataaataaaatgacagtattgttcatatggagaaacaggggtcttaggcagcttaggagtttttctaaagtaacagaatcatttaatggcaggaacaacaatattatcactgcccagaaccctaatggagaactatagctcttaagggtgatgtggggagaaatacactgatgaaaaacaatcaacattattaaagacaggatgggagagagtgggaactcgtcattcatttatctaatggcttagtcagcaagtaactaatgcctactttgggccttgacactataccaacattgtgcagaaagtgattaaaatgcaaaagaacattcacttaggctgggataaacaagaggtcttttgcaaaatctgatgatgagcttgttgatgttgagttgacaaactatgcagcaggtcagtgggggggtgattatcataaaattccatcccttaaacatctacaggaagatgattattttaagatgctttacttctggagatgtatgctttacttctacttagagaatctggcttatgttctcatgttctggttttatatgtaattggtcatgagcttaatttgagccaagcatttgacacagttgcccccagaagttaactcatttgtggattgtataaatgctattgcacaaaaaagaagtatatatatacaaatagtcatagtagaccacatctcagttaatggcttcaagtctagatgaaatgttttaagagggatattgacaaattagagaacattagaagcatttgccagaatactggcagggcaagaaattatgccaaatagtagaaagagaattagatgcctaagtggaacatggtgtatagcccataagaatttgaaggattgtcactggtagaataagatgttattcttggctgcttccagctgaggagtggtggatgggtgactaaggcctataagagagcaaatataaggaagagtttctagatattaaaatcaatttccaaagaaacagcctggcctctaagggaaagagcttcttgtgagtagatgtgtttaggtggggccagatgaacaagctcctgagctctagggattagactccttctgctggataggaggtacaaccaggtcatcccagaggttccttgtgttccaagattctgttactctatgatttcatgacttggatgtcacctcccttaggttggttactctaaataatgttaaaagtcagtgtatgccttaagattgggtgaattgctatgacagaatgagatttaccagagaagcagttaagtctaagaatgaaactactgtttctaagtgaaagaggtatgaataacctaaagataatatttttctctgtagatagaaagaatttgtattataagtctgtgttgggtgtatagtagggcatcaccagaattcaccctaactgggtgaattcatggcagtgatcagtagaatatgtagtttaacaatgaggccttatcatttctaagtagtttctttttgagacggagtctcaccctgtcaaccagagctttgccctggaactcttggagtgcaacggcgcgatctcgggtccctgcaacctccgcctcccaggttcaaacaattctcttgactcagcctcccgatttctaagtggagagttatgaatggcccaaagataatatttttctctatagatagaaataatttgtatgctaggtatgtgttggatatatagcaggacattaccagaattcagcctaactcggtgaattcatggcagtgaacactgcaatatgtggtttaataatgaggccttattcttaaggcaaagctcagaaaagctgataagcaaattagaaaggtctattgaaaagtgtctgttggccgggcgcagtggatcacgcctgtaatcccagcactttgggaggctgaggcgggtggatcatgaggtcaagagattgagaccatcctggccaacatggtgaaaccccgtctctactacaaatacaaaaattagctgggcatggtggcatgcgcctgtagtcccagctactcgggaggctgaggcaggagaatcgcttgaaccatggatgcagaggttgcaatgagctgagattgtgccactgcactccagcctggtgacagcaagactttgtctcaaaaaaaaaaaaaaaaagaaaagtgtctgtctagccaggcgtggtggttcatgcctgtaatcctagcactttgggaggccaaggtgagtggatcacttgaggtcaggagttcaaaaccagcttggccaacatggcgaaaccttatctctactaaaaacacaaaaaattaacaggatgtggtggtgcacacctataatcccagctacttgggaggctgaggtagaagaatcgcttgaaccgaggaggcagaggtagtagtgagccaagattgtgccacagcactccaacctgagcaacagaacaagactcagtctctgaaagagagagagagatgaaagagagagagagagaaagaaaaagaaagaaagagagagaaagacagacagaaagaaagaaagaaagaaagaaagaaaaagagaaagagaaagaaagaaagaaagaaagaaagaaagaaagaaagaaagaaaagaaataaagaaagaaagcaaagtgtctgtctgccaacctgcttccacaaaggcccctcttctgattgtagaagtgcctggtttaggatggcagtgtgctctacctgctgtctggtgagtagtcaggattggacttctataagacaccctctgagaggcttgcaaataccttcagaatcaggcagaggtctttggccagttatttctgaataaagcatatctgcgtgtctgtctgacctaagcctgggaaccacgatggaagatactgtttgaacaacaacaacaacaaaaaaaggcagggaacttaagagagaaatggattttagtcactaagaacacgaagaggaacattttgataatatgtactctatacaaacagaatgcttatacaagacaatcaaagaggaatgggtagttttctaaagagtaaaacctgtatttttaggaacatatatttgtttacaatatattttttcttttttcacccttgatttttaactatttaataattttctacaacatttttttctttttttttttttgcccttttttttttttttttaaacagagtctcgctctgttgcccaggctggagtgcaatggtgctatcttggctcattgcaacttccgcctcctgggtttaagtgattctcctgcctcagcctcccgagtagcttggattataggcacctgccaccacacctggctaatttttgtatttgtagtagtgacggggtttcaccacgttggccaggcttgtctggaactcctgacctcaaggcccaccttagcctcccaaagtgctgggattacaggtgtgagccaccgcgcccagcctgcccttgatttttaactatccctcctgtgaaaatttaagtctttctgtgggttaaagggaactggtaaagagcactggatttatgcttgggctggaatttccctctaggtttggatgtaatgaaggcagtagagatttgggtttataacagaggcagatttgtgaaactataggagttgaagcctgagggtccctcacttgcagagaccccttccagggtcctggaaggaaccctgctaatgtgttattatggtcattttttttataaaaattgcaaaacataatgtgtttcagccatgactggttaagatcattgtcttcttccaattcaactttccctcctttctccttccctttctagttgggtggcattaaagtggtcatgcgcattttgtatttgtaattatgtattttttttttttcttaaaaaggacccccccaccaaattgtataagtttcaggccctaaaaacatggatcttccactgggtgtaggaatggaatgagtaacaatttggaaattgcctgtgtagcagaatcagcgaaaagtcagagtcagcagtcaaaatgtgatggggagagtgagagtaaattggaatccataatcccaacagcatttgacagtgggaaaatggagctttttcccccctctttagggttcattttaaagaattccatgcaaaggatatcatgaattgagaaatatacatcagattcatcagattaaaaattttttttttttttttgagacggagtctcgctctgtcaccaggctggagtgcagtggcgggatctcggctcactgcaagctccgcctcccaggctcacgccattctcctgcctcagcctcccgagtagctggaactacaggcgccaaccaccatgcccggctaattttttgtatttttaatagagacgcggtttcaccgtgttagccaggatggtctgatctcctgacctcgtgatttgcccgcctcagcctcccaaagtgctgggattacaggcgtgagccaccgcgcccggctttttgttgtgttttttgtttttgtttttgtttttttgagatggagccctgctctgtcgcccaggctggagtgcagtggcacaatctcggctcactgcaacctccgctcccaggttcaagtgattcccctgcctcagcctcccgagtagctgggattacaggcacgcgccaccatgcccggctaaattttttgttttttagtagagacagggtttcaccattttggccaggatgatctccatctcctgacctcgtgatgtgcctgccttggccttccaaagtgctgggattacaggcgtgagccactgcacctggcctaaattctttttaaaaatagcaaattcttaaaaataatgcaaattgatgatgaattatgaaaatcatgatgagaaactcctgactgaagagagaaattgttggaaaatgattctccttttcctctactactttatgtaattataaagcctttttctaaagttcctttctgacacagaaatactggccaacagaaattcaaaggaaagttgagacttttgaagttcaggcaatttatatggtgtttcaggtgttactacctctaatagtctatcagtaaaaccctgataggggatggtctctcctttttgccttctactccatctcttctcacacacacttgtgattctttttctttttttaaaaaattttattattataatactttaagttttagtgtacatgtgcacaacgtgcaggtttgttacatatgtatacatgtgccatgttggtgtgctgcacccattaactcgtcatttagcgttaggtgtatctcctaatgctatccctcccccctccccccaccccacaacagtccccagtgtgtgatgttccccttcctgtgtccatgtgttctcattgttcaattcccacctatgagtgagaacatgcggtgtttggttttttttccttgcgatactttgctgagaatgatggtttccagtttcatccatgtccctacaaaggacatgaactcatcatttttatggctgcatagtattccatggtgtatatgtgccacatttgcttaatccagtctatcattgttggacatttgggttggttccaagtctttgctattgcgaatagtgccacaataaacatacgtgtgcatgtgtctttatagcagcatgatttataatcctttgggtatataccccagtaatgggatggcaggttcaaatggtatttttagttctagatccctgaggaatcgccacactgacttccacagtggttgaactagtttacagtcccaccaacagtgtaaaagtgttcctatttctccacatcctctccagcacctgttgtttcctgactttttaatgatcgccattccaactggtgtgagatggtatctcatagtggttttgatttgcatttctctgatggccagtgatgatgagcattttttcatgtgttttttggctgcataaatgtcttcttttgagaagtgtctgttcatatccctcacccactttttgatggggttgtttgtttttttcttgtaaatttgtttgagttcattgtagattctgcatattagccctttgtcagatgagtacattgcaaaaattttctcccattctgtaggttgcctgttcactctgatggtagtttcttttgctgtgcagaagctcttgagtttaattagatcccatttgtcaatttttgcttttgttgccattgcttttggtgttttagacatgaagtccttgcccatgcctatgtcctgaatggtattgcctcggttttcttctagggttttcatggttttaggtctaacatgtaagtctttaatccatcttgaattaatttttgtataaggtgtaaggaagggatccagtttcagctttccacatatggctagccagtattcccagcaccatttattaaatagggaatcctttccccatttcttgtttttgtcaggtttgtcaaagatcagatagttgtagatatgcggcattatttctgagggctccgttcggttccattggtctatatatctgttttggtaccagtaccatgctgttttggttactgtagcctagtagtatagtttgaagtcaggtagcatgatgcctccagctttgttcttttggcttaggattgacttagcgatgcaggctcttttttggttccatatgaactttaaagtagttttttccaattctgtgaagaaagtcattggtagcttgatggggatggcattgaatctataaattaccttgggcagtatggccattttcacaatattgattcttcctacccatgagcatggaatgttcttccatttgtttgtatcctcttttatttccttgagcagtggtttgtagttctccttgaagatgtccttcacatcccttgtaagttggatttctaggtattttattctctttgaagcaattgtgaatgggagttcactcatgatttggctctctgtttgtctgttgttggtgtataagaatgcttgtgatttttgcatattgattttgtatcctgagactttgctgaagttgcttatcagcttgaggagattttgggctgagatgatggggttttctagatatataatcatgtcctctgcaaacagggacagtttgacttcctcttttcctaattgaataccctttatttccttctcctgcctcattgccctggccagaacttccaacactatgttgaataggagtggtgagaaagggcatccctgttttgtgcccgttttcaaagggaatgtttccagtttttgcccattcagtatgatattggctgtgagtttgtcatagatagctcttattattttgagatatgtcccatcattacctaatttactgagagtttttagcatgaagcattgttgaatttttacaaaggccttttctgcgtctattgagataatcatgtggtttttgtctttggttctgtttatatgctggattacatttattgatttgcatatgttgaaccagccttgcatcccagggatgaagccagcttgatcatggtggataagctttttgatgtgctgctggattcggtttgccagtattttattgagaatttttgcatcaatgttcatcaaggatattggtctaaaattctcttttttggttgtgtctctgccaggctttggtatcaggatgatgctagcctcataaaatgagttagggaggattccctctttttctattgattggaatagtttcagaaggaatggtaccagcttctccttgtacctctggtagaattcggctgtgaatccatctggtcctggactttttttggttcgtaagctattcattattgcctcaatttcagagcctgttattggtctattcagagattcaacttcttcctggtttagtcttgggaggatgtatgtgtcgaggaatttatccatttcttctagattttctagtttatttgcgtaaaggtgtttatagtattctctgatggtagtttgtatttctgtgggattggtggtgatatcccctttatcattttttattgcgtctatttgattattctctcttttcttctttattagtcttgctagcattctatcaattttgttgatcttttcaaaaaaccagctcctggattcattaatttttttgaatggttttttgtgtctctatttccttcagttctgctttgatcttagttatttcttgccttctgctagcttttgaatatgtttgctcttgcttttctagttcttttaattgtgatgttagggtgtcaattttggatctttcctgctttctctggtgggcatttagtgctataaatttccctctgcacactgctttgaatgtgtcccagagattctggtatgttgtgtctttgttcttgttgctttcaaagaacatctttatttctgccttcattttgttatgtacccagtagtcattcaggagcaggttgttcagtttccatgtagtagagcggttttgagtgagtttcttaatcctgagttctactttgattgcactgtggtctgagagacagtttgttataatttctgttctcttacatttgctgaggagtgctttacttccaagtatgtggtcaattttggaataggtgtggtatggtgctgaaaagaatgtatattctgttgatttggggtggagagttctgtagatgtctattaggtccacttggtgtagaactgagttcaattcctgggtatccttgttaactttctgtctcgttgatctgtctaatgttgacattggggtgttaaagtctcccattattattgtgtgggagtctaagtctcttagtacgtcactaaggacttgctttatgaatctgggtgctcctgtattaggtgcatatatatttaggatagttagctcttcttgttgaattgatccctttaccattatgtaatggcattctttgtctcatttgatctttgttggtttaaagtctgttttatcagagactaggattgcaacccctgcctttttctgttttccatttgcttggtagatcttcatgcgtccctttattttgagcctatgtgtgtctctgcatgtgagatgggtttccttaatacagcacgctgatgggtcttgactctttatccaatttgccagcctgtgtcttttaattggagcatttagcccatttacattcaaagttaatatcattatgtgtgaatttgatcctgtcattatgatgtcagctggttattttgctcattagttgatgcagtttcttcctagccttgatggtctttacaatttggcatgtttttgcagtggctggtaccggttgttcctttccatgtttagtgcttccttcaggagctcttttagggcaggcctggtggtgacaaaatctctcagcatttgcttgtctgtaaagtattttatttctccttcacttatgaagcttagtttggctggatatgaaattctgggttgaaaattcttttctttaagaatgttgaatattggcccccactctcttctggcttgtagagtttctgccgagagattagcttttagtctgatgggcttccctttctgggtaacctgacctttctctctggctgccctgaacattttttcctgcatttcaactttggtgaatctgccaattatgtgtcttggagttgctcttctcgaggagtatctttatggcgttttctgtatttcctgaatttgaatgttggcctgccttgctagattggggaagttcacctggataatatcctgcagagtgttttccaacttggttccattctccccgtcactttcaggtacaccaatcagacgtagatttggtcttttcacatagtcccatatttcttggaggctttgttcatttctttttattcttttttctctaaacttctcttctcgcttcatttcattcatcttccatcactgataccctttcttccagttgatctcatcggctactgaggcttctgcatttgtcacgtaattctcgtgccttggttttcagctccatcaggtcctttaaggacttctctgcattggttattctagttatacattcatctaattttttttcaaagtttttaacttctttgccattggctcaaacttcctcctgtagctcggattagtttgatcgtctgaagccttcttctctcaagtcatcaaagtcattctccatccatctttgttccattgctggtgaggagctgctttcctttggaggaggagaggcactctgatttttagagtttccagtttttctgctgttttttccccatcttggtggttttatctacctttggtctttgatgatggtgacgtacagatgggtttttggtgtggatgtccttcctgttcattagttttccttctaacagacaggaccctcagctgcaggtccattggagtttgctagacgtccactccagaccctgtttgcctgggtatcagcagcggtggctgaagaacagcggatattggtgaaccgcaaatgctgctgcctgatcgttcctctggaagttttgtctcagaggagtacccagccgtgtgaggtgtcagtccacccctgctggggggtgcctcccagttaggctactcaggggtcagggacccacttgaggaggcagtctgcctgttctcagatctcaagctgcgtgctgggagaaccactactttcttcaaagctgtcagacaggtacatttaagtctgcagaggttactgctgtctttttgtttgtctgtgccctgccctcagagagggagcctacagaggcaggcaggcctccttgagctgtggttggctccacccagttcgagcttcctggccgctttatttacctaatcaagtctcagcaatggtgggcgcccctcccccagcctcgctgccgccttgcagttcaatcttagactgctgtgctagcaatgagcgagactccatgggcataggaccctccgagccaggtgcgggatataatctcctggtgtgccattttttaagcccattgggaaagtgcagtattagggtgggagtgacctgattttccaggtgccgtctgtcacccctttctttgactaggaaagggaattccctgacctcttgcgcttcccaggtgaggcgatgcctcgccctgctttggctcgcactcggtgtgctgcacccactgtcctgcacccactgtctggcacaccccagtgagatgaacccggtacctcaattggtaatgcagaaatcacccgtcttctgtgtcacttatgctaggagctgtagactggagctattcctatttggccatcttggctcctcccccagatcacacacttgtgattcttgctggcattcacacttactctctctttattttttgagacagggtctcactttgtcatccaggctggagtgcagtggtgccatctcagctcactgcagcctccacctctggagctcaagggattcgagtagctaggactacaggcgtgtacctccacccctggctaatttttgtattttttgtagagctggggttttgccatgttgcccaggctgatctccaacacctgggatcaagcagtctgcccaccttggcctcccaaagtgctgaaattacaggtatgagcctccatggctgggcacttactgtctttttaattatcagcttgcaaatgagaaatctgcccaaggagcctgagcttggtgaatacaagttcatttcagccccattggtgagtttatgattctatgagactttaaagatgtattttatttggacatgttaaaaaaaaaaaaaaagaaccgtgtgtttcttcacaacatccaaaataattattttattggtattgataattattattgaggaatagggaagtcatgtatgttatcaaccacttcctaaatgatacctagttaacacgttaggggagggaatcgaatctgaaagtgatacccatttagtgaagccaagcaatgtagcaagagttgagaaaaacttataaagggacctcttagcccatgtccataacattgtcgttaacataaagataggttgccagagaaagggtaactgtatggtcaatttagccaggtctgaactctcaaaaatcaagcactctcattctgttagggtgaagtcagagaaaagaaccttcacaaggtttgaaaacacagttgtaacatactgggctgtgttccagggctagcatttgactctgatttttatcttgtgcttagaaccagcctactgttgtctctgtgcagagagagtactaagtaggtactgaataatacttgctgtccagcacatagctctgtgcagaacgagcactaagtaggtacttaataatgcttgctggccagcacatggatggatcatgtttataagtgtgtatcataaacactttgccttgaggaaattgttttctttttagagttttcatactgtggacatccttaaaaagcccagaaaatgtatctttatggattgacatgtgacttcttacatatgaagttagaagccaatgaaatgctgttctttggactgaactttcaagactcatgtgtgtggtgtctaattcattaactaaaaatatgattcatatttaccttatgtaggactacaggtatccacatatccaccattaggatattctttaaatctggtagtttggaagatttccagacattgtaaagagtaaatgcatcagaaataagcattttccagaagagggaggtatgaaattgtaatgattagcctgttgcttagtcctggaaatgtgaaatcagataaaaatgaaaaagatgctttccttgcattctcttccagaaatatgcagcctgctgctcttttgtcttcagtgtgaccatgctgccctgaggagagcccagaactgtttttaaattcaaaaggacagctgctttctgctcactcaggtccactgaggcatgctccaagacaggaaaaaggtgcttagcggggctctttgatagagattcaatatatgaattttactttgagaataaaaagctcacccacttttaaaaggttaatcaaaagctcattgtagtgtattcttcctttcctatgcagtttcctatggaaatggaatcagtttaaattctggcctcagaacagcaatatttttcacagaggcagtccttctgccaagtggctctagaagtacccgtaatatccatgtcaggagtatgaaaaatgaaagggatgaacacttccttcagaaattatacctttgattcctttactttacggccaggcaggaagaatcctgagagaggtctttactgaaagttcagtatttatgaactacatactgaaaaatgaaaaacgattcctagcactgagttgcttaccctgtcaagtttacccattattttcaggctgttgagcattgtttgaaaaatcgatctgagagctaaatgagactctgtcccttaccatggtcttgctgttataaattcacactgggctatttccattccctaagtttgctttgccctttcctaccctttacctctatggtcttccatccggtaaattttctctcacccttcctggtctagctctatttcatcttcacttatgaaggcttccttgttttccttttttagaattaattgctaattcctcactgctctctaagcattaatacccccatcatagccttcatcataatatgttttgtgctgtagttatttatgtacttacttgtttttcccccttctttgctctttgattaaatgcatgccagatccaactttacagatgagaaaaatgagctctgaagttcaataacttgcccaaggctacccagttagaagagttatggacttcactctgaatatggtgacttttgttctagtgtgttgccttctctagtcttcttaagaaaaaccttgtcttcttttcttttttccttaggttgacttattctatacattagaagtttctaaattttaatcaaactgtcattccagggtcatagtcagccacatgtaaatcagaatgcagttttacatagattcattattactgtgcatggagattagaagccagctcacaagaagacttaatttggaaagatatgtaaccaacttcacgtaagtgctagcctttcattgatttctcacctccattctatattcctcctggcacttgttttaaatctgttctactgaagtccatactctacccccttgctctcagccgatgatctgtttacctgctctgagaagatttagatcagtagttctcaaactttaatatgtataaaaatcacatgcagagctctttctaacatagtttcccgggacttttcccaggaattctgatttcagcaggtcagggtggggctcatgaatgctccattctaacaagctcccaggtgatggcaacacagctggtctgaggactacactttgagaacctctgatttaggccatcctctgcaataggatgtcttctccaatacatcttctctggatatttatccttcctctccttctatgagaattcagtcgttctattctcaggctgaaccctctcaccacgagcttttatcccatctcatttcatctatttcaggaccttgcttcaacttggctctctttgaatcttttatatcaccctctcaattgctttttattctctactgctttactaataaaactgttcctttctcagttgtactatttaagatacatctaatgattgtaagcaaaattattttctctaagaatggtcgacaatttcagattcaactcagctggctaggaactaagtttctgtaatttgggaattggcttgtagagagcaaaattaagaaaccaagtttggccgggcacggtggcttacgcctgtaatcccagcactttgggagtccgaggcaggtggatcacgatgtcaggagatcgagaccatcctggctaacacggtgaaaccccgtctctactaaaaatacaaaaaattaaccgggcgtcgtggcgggcacctgtagtcccagctactcgggaggctgaggcaggagaatggtgtgaacccaggaggcggagcttgcagtgagcggagatcgcgccactgcactccagcctgggcgacagagcgagactccgtctcaaaaaaaaaaaaaaaaagaaaccaaatttaactttttttaatggatgtgagtggaagagactaatgagataacacaaaagagttaacttcttacatttctgtagtctaatacgagatagtttctccaggaattaacacagcacatctggttcactgacctgagtttgtttcctggtgaggcattgcagtatcatccatatctcaggcaaaggtactccagcattttgtagttaagcagttggaggaggagtagggagaactgctgtactttgaaacatttcacagtggactactttgcattctaatgatgttctccttacttaaggactttgttatgtaaggatactttgtccttctgataatcacttacacttttcttctgtgttcatgtcacttcattaatcctgattacttgtaatgaatcataatcttacccacttattcttgtgtgactcattcctacttgtattcttaatagtattttctatgtctgataacacattgtcaattgactatgctatttttaacgtaagcgttggcaaaaaggtttacttagagaaaagctctacatttaattccccggtgcctcagttcccaaatttgctaataaagattatacttagctgtcactccacgtttcatcagtaggattaaaatgaatagagatcatgaaataagacaatgaaaaaagataattataatggaccagattgagaaatccctacaaatcaacagaagcgacctgccatgtcagattcctagatgcagtttatttactcagtgggccatatttcttccttattctttctttttccatgatgccttccaaaactatattttaaccaggagggaaataccatttgtcttctgatataggaagatcctactgagagattatattcatatatttcgtccatcggcctgtaggtggaattgtatttaaaatactaataaaggttattattgcttatatatctaaaaatgctccaactgtccaaacaaagcttatactgttgatgatatttatcagtggctctgaacacttgcatatcataaaattctccctcaaaatttaaccttaaactctttcaggcttgtcttggtcacagtgggaactgaggacagctgctcatgttttttgatagaacagctcttaacatgcttttgctcttgcctcccactgcccaacaccagctgcatacacacagtctacttgctgtgtgcatgctctggctcctgtctccttttccttcagcctagttagcctggttttgtttggtttcatcatacaatgtatctattagtaaaacttttatgaactctgattatagtactaaactcataataaagtaatcagaacttcatttattaaaacactgtcttgagcttattttttaatttagtacacatgacaatttggtaaggtaggaattttcattccccttttatagatgggaaaactgaggtccaggatataggtaacattttcaaagttaactcgtaagtaaatggcttagctggaatttgaacccaggtttctgcaattctaaagcccatccttttaactgctatgctatgcgcacaattactgtattcttatttgctctctgaaatacaacaccttattctcatttcatctgctctttctgccctgtacacttcagtttctgctctatagatacctgctcgtattgtgacatctcaattttttttgtaccttggcagggttttgattgatgtattggtgttctgaactctttagcatatgtattaatagggaagacctaccaaatatttcatgtaatagggattattttgtctacctattttatctttctttataatgtaagtttgtagagggcagaaactataaattgctcagttagggactccacattgagccaagcacatacatacttgacccagagaagtcatcaccatctttatcgccacagctaacatatgggtagtgctcaccatctaccaaacatgtgcatggattattttatttactcttcacaataaccctataaagtagactatgttgccatccccaaggttaaaaaactagcccaagttcatcgagttactgcatgatagagtttgagtctaaccaacaccaatctacacgtctgtcaacacagttaactatcccacacttctcagtggaatctagagttccacttatttcctattccttccattcttcactatatgtcctctttgccttcttatcctgtttctctacttctcactttctgccctatacgtatctgctcaatcttcaatcttctctgccttaccctctctttttcaattttgttctcgttctgtcctatcctgcctccccactcttcttacctcattttcctagtcctcttttcttctttttttcacctttttacctcttacatatttcttttttaaaagtaacttcaagcttgataatagattcttcaacgctcttagcaatatcgtatcctaaccataataaaatgatagtgtgctaggtgtaaacagaagtagaatatgaaattgaaatgaagaatctctttactttttctattagaaacataaataatgagtgactgtaacatcttggtctccataatttctaagtgttaaataaaacacatttctttttttatttaacacacacacatccacacacacataaacttgttttatgcattgattgccatttattgagcagcatatttttggaaatgcaacaactacaaaagaatttttaagttattatcatacagtgacattaataggctcatcactttgccttctttccttgttctatcatgtagagggttgctttagagatcattgtgtattgatatgaattatcattgaagttttattagtctggatgtctcatcttgggcattttgataaatttcttttgctccaaatccagaagttatggccattcatctttataaataagactttttaaaaaaggtaaagtcataaaataaatatttcaaagcagtgttggatatagccagctgaataaactgccctttctagttaactttgaactctaaaccttatttaaatatcctccctttttttctgtaaagaagacgagaaaaaaaaacaatttcagtagattctaaaagaaaatatagcaagaacattttcataagagatatctcacataaaaagctgtaaaaattgggcaagtatttgcacctaaccagtagaacttagaagagaaaacatgaaatgaacttcttagcttatggaatggtgtggataggtttgcattacttagatgttcacagagctctagcatttacttactgaaacactggaatggttcatatccctgtggtttccaccttatttcttccagaaggattaggttttatgctgccagagaccacattgactcttagtaatgggatcactaaattctggttcacaattttgtgcatagagagattgcactaatatctcaaaattgtagctatgattataaccctggcatagaaatctgagctatgctggcagtgtcatgctgtacaatcgaatccacctgattatctctgcatttgtgacagctgggctggccttcattggcatatgcctctttgctgtgcccagggctttgaatgcaaaatgaaagatcagcatgatattaggggcccatgatccatagatggagcttcacaagtgaacagcgtctcagctttaacatggcccccagtatcctgctttatctttctggactgaagttcctatgacagatttgttgctttaaaaaagtaattttgcagatttgtccttttttaaaagaaataaagattgccttccatttcctactgaaagtgatatggtagtatccatcttataattgcacagattcaaaaataagccacaagtatgtgtgctgaagtataactgtggactataaaatacagatatcatagcctataatatggagggtagtgtgatgttataaagccatttttctgtgttttacattatcataaaatttaactactgaagggaaagtgaaggttttaatatttaactaagcctagcacttgaagagaaacacatatattttacttggaaaaaaaggaagttccattttggacactgcaaatgacagtgccagctgttgtcataatatttctaacatccgctgaggattaattccaggcccagcaaattcactggatgagcagaaacagccaaagaagtaaacactggagcttatgctgtgatattattaaattaggcatgagacttctacagagttggatatgtagtgaacactggattatcatgcctgaggatcgtttgctttgtgtatatctgcagaaaattgaatcctgaacttgctttcttctgcctcttggccctcttcctctgtagaggtatactcagaaaatgtgatctcatttgaatataaacttttctattaatattcattaagtactcatacaatataagctgaggaaacaaagtggtgggtgtaaaacacaggcctcatgtaaagagcttactttcactacagaggcaatgtagcataatgaagcagagatgggtttcagaggcaggtagaccagaattcaaatcctacttctcctaagtatggccttgggcccatcacttaaatttctgagactcagtttccttttctatgaaaggtagatactaatcatgctacagagttctattaagaattagaaatatttaaagatacttagaccactacaaggtagctatttttctagaacaggcataccttattgtatacattctatgtttctagaacaggcataccttattgtatacattctatgaaacagaatatggaaagtgctaaatgaaaggcacaatcagagaattccccaggccctcaagaaggaaggcggaatggatgaggaagtctgctgtccaaggggtgggccagagctaaggcaagatttgtgggtgggccttcactaaccaggcacagggagagggcattccaggagcagatgtagatctggccaaggaattaagacaggaatgcaagtggcgttttccaggcaaaagattaggaagttttagatcagcctggatatggagaccttgaatagcaagccgactgaggaatgcatgaaagaatgactactagctggaataagagataaatctcaaggcctcttttctctttcacctctcctcttgcccacatcatggacagatagttctggcttttccttatactctgtttctgtaagcaattttaagaaggcagagtgcataatggtattacttttatgtctgcgtgtgtattgccaccatgaagcctatagttttgcttttcaaactactagattgtgaccttgtaatgatctggcaaaaggctgaatttttaaaagcagtaaatccatatagtggataatattgggaaaaaattagggctaatactgaggaatgagaagattaggaaagagataaataaaatatgggtggtataaataaaaattaaagtgaaaatgtggggaaaggactgcttatgattcaccttacaaaatttctaccttatggggtctgttttcactgtcagttctttctgtgaatgcatgttcatgaagatactgaaggctgtttttctataggcagctggtggttttctgctgtaggcagaagtggttgaggtaatcctagggaggtgatgctgaatggggctgtggttctactttatgtaaggttattatatgtgaaagaaagagtaatttttaaaagtaattaactagtggtagattctgaactaacattagcaaaggttgattataaatcagattttatttttactactgatttagaaaaaatctttggagaaatagatttggaatggttaaatatcactttagggagcacattttggtatcacagcttaaaggtactcttaagagaaagctttacaaatggggcaacctgaaaagacacatttcatgtgcattcaaattcaagataagacccaaagctctgttgccaaggtaaaggttttgagagttaaatgggaatttggaaaataatatgcaaaaattgacttaaaatgtagataagcctacaagtatttacagggtggagacatcagagaatgtaagaaatagtttggatcactaacaggaatgtgtaatgggaagtcaaaatctatgctgtcaggaaaaattcatattattggatagaaactgtattatttggtacatttaagataaaatgaaaattgtgttttcaaagggttacgcctcgcagtggatgagtgattggggcgttttctggtttcagtgattctgtaggcagaaaacagtttttactgccaagtgtgtcagtggaggtggggagacagagaccttgctgtgttaagtgaaatctgttgcttaagaataaagctgggatttctgtagaatggagaaggagtttggtattatcatattatcaaaaataactgctctttgaaaagtagattttttaaagtttgattatcaagtatttatttaaaatactgcctaagtatttaaacactttcaggctctgattttgttttttttacaaaggaaacctatgcctaaaaattattttaagtagttatatggatacatgagctacacagtttcagacctgtgtatatgactttctaagaggtctatggtatccaataataaatgattttatgcagggatttaacacataatgggtcatgcattatctataccttgttaatgggatctatatagagtgatagcagaaaagaaagttaattttaggatcctttaatgcctataaatttagagcaaaagaaatatttctaaaagttcaacttttgtatacatatgcccaatcacaagttttacagacatttttacacgtttaggcctgaaatatttgattccgctcttatttgtcaagatacaatataattacattagtaaaatgcaaacagggcagataagttttccttctttttcctatgctatagtcatgctgcaaaccctccattacagttttttggctgaggtaggtctagatgtctagaggccaactaatacagttttatataatcaacatagggaagtcatttcagagactggcattgagctcttggagggaagaaaatgaaccttaaagcttcttgggaatatccctcactgcagcagagtttatgtgctctaatggatgctccgtaaatgcttgagagaatataagtcccataggttagcatatacttaattctacctatcatggaaacctctccatacattctatagctgaaatattttaggagctcaaaaggagtaacagaaactaaagggaacaccagctccaagattggatttttaggctttctttctagtgtaacacttcccttcctgttgggccatcggcaaccatatcctggctaattagaagtgattttcaggggaaaggaagaggtcataagttcttgcctccctattttccttcttgttgggtgctagtaacttaccttaagaagtaatgaagtcctagtaaaactcctaatattcagaaaccaactctcattattcaaacatgttgaggaaaaaatgtctccttgcgtcctcttctgcttaaaactcccccagtaccatcaagcatggacggatatatgatagtggcagtatccagaagacacaccatctatgtaacaaaccctggaaataaagtatggtataatcctaagcattcgctcagcactcttgcttctgggaatttgctatgagtcagccacaggcatctctgtgtaccttcaagcccagattagcacgtatgggaggataagagagaaagtgtacttcctgaatacatcttgggtagagtaaactaatccttagctaggttgatgacatccttacccagaatttaaaagttcagtagagactcttcttgaaatgttgaatttttatttctgcttgttgccctctatagatgagtgaaatgcaatgaagatattcatggctactataaaaatgcattagttctttttggtgagctacttgactatcagagccaaatatgtaggtagttggaattaaatttccaatttagcatcccccttagaagggtgatggaagctcccatatcttggtatttctctttctgagtatctgctgtctcactgaggcaacatgctagcctccatgttgtattatttcacaggtatagaactaagtgacacattgccaattcccacgccccccccccattttctttgatggaggtagattacatttataaggtgtagatattgcttgaaggtacttgttctttcttataagtaagcaagaaagagagcagcaaataatagctaggaggaagatgtgcccacaccacattcaggccacttagtctatctagtaagatagagtgtttcaggcatcaagcatgtactgggagacatgcatacagaaaaagaacaagcaatagactcctttgagagtgacatggtaggtctgaagagtgaatgtaactttttgtctccatcccctcagtgattcattaattattcattagctgtttttttccaccaggattacaatcattttacctttgcttgccagcctagtgggttattaacagtggttactctatttatttacacattttccttgtgtatgttattcatcctgtattagttcacccccacccctagtcaccattcttttttcttttgtttggcctttcatggctaccatattaccatgtgatcagaaaaaaaatgcactggtgtcagaattaggccaacacagacatatgggatggtaggttcatttgggttggatagagagctgtttgaaacttgtatacacatttttcaatttcaagaagaaacatctgcagtaaaggaagaactgcatagtttgcagtggtctaatggaggtgaactcaggaatctcagatgcatttagctctacaagtctccattatacaaatgatgttgaatgtttcatctcttgctacagattagttttgggccatcatgaaaaactttcctgaagattaagtcaaacttatctatgcatgccttctttggatacatagatccacctttgacagctactctgtccactaattctgtcaagtaggactgagctttcttgaacacctctccttttgttaacaagaaggagaagaagaaaattaaacactcctggcatctgcctggctgtgatttagcccttggtaaaaagtattacaaattgagacggtgccagactgctcctgtgattcatctcttctcctgtcaagaccagttgaggcgatgcaattgggaacctctctagtttgtgaagagacactttatgttggaagcaacagcataagcacaatagtacttaggcattcaaagcagagagaattggttcctcctgattgggtgaacaatcactgcaaattaaggtcaaaagtattgtcaaccaattcagtgtactaggcttcttcatcatttcccatgacttgttctctcttaggagaaggtttagcaaattggagcaatttttttttttaaatcttggtgcagcgttagtgataaaacacaagaaagtttaaggctggatatagcatgtgcatctatatcaagatgaagatccatagagagatgtgcttgatcttgggatgctggatgaaaatccaggcactgtgttgtgggagcctgatttctgaaagttggggcatcattgtttggcttatgacgtttataagtgtcaggtacgtcttgtcccacagaatacttgttatagctgttaaaggacagattgtcttcaagacaactggtacccatgccagagtagggtatattctgacagaaaatccatttactctcatctgtaatttatccccttagttgaaacatgatcccagtgtagggcatttacttttcacactccgtttaaatcagtgtggtttcttcctaccttaatgaattttacctcatttctttgtcttgcaaaaacccagggcagaatggtaaaatttcaaaacaaatctttcacaaggctggaactagacactctgttgggtcacatgcaagttatttgcagaagaggaacactttgcatgtgaataagagaaagcaaagcacttacaccagtattcagtgctcttggggccaggagtgaggggccttccatgtttgcaggacatctgtttgggccttaagttctgctacagccccaagtccttatctcatatctgcctggtgtcctatttttctgcttaaagagtcaaagactgaaattcttatccttgtttcccattcattcctaagttactttagccttcacatggagccaccatgctgtggcccacagagtgtgctattcacttaaacttatttatcttaacctttttgtgaaatatggttgcattctttgactttccttgcttgtcacagtttacattaatcctggaacttttgagtcttaagcgctacatgatagtactctttctaatggtttctaatgttacacgaatgcctctctttcccatttcatccctttctctctgttggttttgactttaagctctctggctgtttcatggcaatgattattggtgacagtattatctattaccaagtgtttcttgttcagttttgcatagtttcaatgtccttttaagcaaggattgccaaactacaggccacctgtttttggagatgccatttaattggaacactgccatacccattcatttacatatcacctatggctcctttctcactacaagggcattgtttagtagttgaaacacagaccttatgtaccttcacctcaaaacctagaatatttactatctgactctttacagaaaaagtttgctgatctctactttgaagaagagaaagtcgtcagatacatacaatgccaaagaactgctggctatgaaagggatattgtagaattctgcaattttcttaaagaatggaaaacattggaaaagagtcacctgtttacaggtgatttgcatttctataggtatcagaataatgtgggtgcttgtaggttggggaaggaatggcaggccttctctctctgtcagtatcttcaggccctgaagtcatacaatcaatggattgcttttcctcttcacttttccattttgccataattttgccaagggggaggttggaagtgggttaatattttgcgttagaagagcatttggatacatcctgataattactttatctcagatattcttagattctctctagtgaaggccacaccttctctgtgcctcaggctggcatggcccaactgtgctacttaccttgggttcctgctgctcagcttaaagggaatctctttcatatgcctagagccttgtttactcagttcaggtctgtaccagttgacaccaagtcaaaaagcactttagacagaagcctgctttgaaagtgctagctagcagcaaataagtctggcttaattctcccttgagtctggagatctgattggaagggtaaaagggagaaagggatgatttatttgttgactggattgactactttatattagtaattatgaggcaattctacccacattatctcatttaactccccataaaaaccctacaagggaggtaatatactttggaaaactgagactcagagaaattaagtaaattgcaaagtccccatgctataagcattatagtctcataagcaaatgtcatgagcttcttctagctttttcttcatgctcacaaaatggttgaaggagatccaagcatcatgtttctagttaaaaagaaggtgcagagtaaaaggcaaaaggcaaacggacaagccaaccaagtttgttctctttcctagatgttctacttggtgacttcagcttatatctcattaatgtgcatcataggattatctctgcaagggaacctggaaaatatagaaatttgtttgtgttaagctgggcaccttgccacctccataaaaatgtgctctataggtacagagcaggagataatcattattaataggcaacttatagtctctgtttcaagaggtcattctggtacctgagaaaattgacaatctctggtctaaactcttacaggcctctcttgccttcatttaagatgaacttgatagaataaagattattgttgttctctaatctcctgggtatgagacagagaggtaacagatggaatgatttctttctggcttccatagcaaaccaaagcatgtgccagtgaagagtggcaactgctacaaatacttagccaaacgtggggaagagtgttgatgctgtaagtctcctagctatgtcgaggcagcaggtgtctctgtagatcagggcagcaatccctttggtaagggcatgaagagggcacttgggactactggattgcatcatcttggcagagaaaaatgtagcatatactggaactctagctgggtagggaattgacaagttgaaccacaagttgactactgttcagtcagcactagcttttatcttccagtcaccattccctgtggctcttcattgatcgtccacaagctccaggcctgggtggtgcctgttgtgatataagaagggaagagtgatggtttccaaaatgtgaacactcatgtgtacagttttcatgttgataatgaaatgctagaaggggaacagctagctgatgcctatgtctttgtccatacctggctacccatgacaaagttgttgttgttgtggttgttgtttcactccaggcacaggcacagagccgcaagagtagaaaacaagaattccatcctgcaaaagaaaactgaatcccccttgcttggtcacttagggaatcaagttcaggagggctggacatgttttctgttgctctgtaataggggctgaaacttagttcaattatggtgcttagctgaagcaccatgactgaatctttttttgagaaggagaaaggagaagattttaaaatgaaatgccataagtgtaacatagtacatatagaggtcacaaacttggaaagcctgtggtgtcttggaaggtcacataaatgtgtgaaacacgccagttgcacacaggcaagcatatgtcccttctagagaaattattgccactgaggaatgctggttctaatctccaccctcccttcccctcccctccactcctgtaaaaaccagaggtttggaattttgcgtgaataactcagtttgttagtgttgacaaccaggcatgacagtagctcatttggaccctttgtccaaatcaggaaacagcagcccttccttcatggcagccctgtagctacgccagtcgagtgtgggctggatttcagcccttactctcctccttagctgagactttgtgccagacacaagctgcccagctgtagacagtgggcccagaagttatcagtgttacatgagcaaaacaaaacatatctacgggccatactcagcccatggattattattttgcagcttctgtagctgcggttaaaacaaagctctggggccagatcacctgggtttaaatctgggttctgcccttcaggcaaatgactcagtatttcttggcctcagcctcctctatctgtaaaatgaagataaatacttgtacttacttaacagggttgttacgaggataaaatcaatactgtggggcaaacacttagctctacagagggtgacacatagcacttaatgttatataataccaaaatcatgtgaaaatctgattttttcacacttagagaatatacagcatataaaatgatgggagagtgcatgtcagaccttcatgattattttctgcttcttggggaaatgcttatgcctctttggtcactgtgaagacagagaactcaaaatagtaagcatcacttactagctggcctactaaggccacaagaacaaatgaagtaaacactctgcttgaaccactgattttgtttgcctgcatgaaacacttgcacaggttgacagctgacatccgtaacaatgacatcctaaaaccattaagaaatgattaaattaagttcagtattatctgttgcaaaagacaaagatgtgtgaggtacgttttagaataacttacaatgaaaacaactaaaaagtgaggaagtttaaagtggtgagtattcaattgcttgagttcatcttctacactggctcattatctggaagctgggccacagagttaatactccatctttaaagactgtcacaggtgtttgcacctaagatgcatcaggttctgcagtaaaaatttggttcctggcactgagacaatgctaggaggagggtgttaacttagtactgaccataatgaaatctgtggttgactgcaaggacctgggttgaaataagactaaatccagtagtattgctccggtaggttcaatcatattcaagtgttcaataatgattataaagaagtgtcaagctgtcatgcttactttaaaacatatccagaaaagagaatccaaggaagtgtatttagttctacctgcatttaaattagcttttttttttatcattacatcaatgtcattaggccctaaatgatattaagagtgtctatgagaccccaaagacaaagattgtcccctaaacttctattcttatttgtttaacatggacttggcccagctacctccaatctaaagcttctttctctagagtaaggtatctcaatctatgcactgttgacattttgggccagataattctttgttcttggggctaccctgtgcattttaggatgtttagcagcatctctggtctctacccactagatgctagtgacttccttcccctcaactcatgacaaccaaaaatatctgtatacattgctgtaatgtcacctggggagaaaatcttcctggtgagaaacactactctagactaagaaaagtagccagatttttaaacacaaaagtgtttttcctcccagaggcaaaaagtgccctagagatggaagaattttgaaaataagctcttccacaaactatactgccaaaatggttagagaaagatcctataatcaccatgcttgacaaatggtgtttttgctaagcctcacagcagctttgttcatgtattgtgttaattgcaattaaataaactagtctagaagtgcgggtcatcatccagcccattcatatccctcctttacagtacacatccagacttctttcagagttttgcttgcccattggtgctcacatataaaaactccgtgggtgggagttagggattcatagagcagagagggacctcagctcttcatgtccacttttcttgttttaaaggacaaggcactgaggtccagaaagtggaatttgcagcacaaattgctatgataaacctcagtgattcagcccctgggatcttcaatgatataggcacagaacatataactattactgagtaaaatgtttaaaattatgttcttatggcaatgttcaaggttttaggcataagtaagacaaagcagagaaaaaataaaaaatatttttcaaattgaaggcttaaaaaattaaggataccctctatgtgccttctgctttaggatccagaatcttatgtttgtttgctctttataacacatgactgtgtaatatcagtcaattgtgactggtaaatttccattaatttgcctaatcatatttagaaattatgcctactaaataaattatggttggaacttgaaaggaataatggcttaaataagtgatttgttctttagtcagaaaaatattctcacgctctctctcataccctcatgaagcactgtcatctccatctagtttataattaaggcaatgggaccaaagtcatcctgttggcacaggatggccatctctgcatccaaatttcttttactaattggagaaaaccactaattgtacattttaaactcaaaatgtctttatgtatatatatatttaaaatatattttattatttttattaatttattaattataattatatttattaaaataataattatttttattaatttatacatatgtataatttatgttttctccatgtggctagctgttgatctaaaggagaaggagcaaggcaggaaaattatcaggttcagtgtttaactgggagatgaggacatcactaaaagaaaggtacagcaggttctactggtatgtacaagttttgattacaaggtgtactcttgccacctggtgtggtgtctcagctaactttagtttctgattaccggggtctctgagacaactctccagggtcaggtatagagctccttttgcccttggcatgttccaaatcgcttccttatgctcaaccttctgagcaatacaaggaaaaattccttgtattggcatgttatgaaggttattgaaatactttaggaaatgcctttgaccttgttttgtacttagaggatgatctcattcagaaatgggtagtgtcaaaatatggaatgtgctagtaaaataagcacacaattcacttaaagaaacaaaaacaagacaagacaaaacaaaacaaaacttgtttgggatgggtgaaaggcatggggctgcaattcatcctggattttaaggttagaagtggttgaaagaaatgtgatatttttacctaaaccgtggtcaactatacttttactttttagcaatgatgtgaatgaagaatggctttgaagactgttggtggatttgacaaatatttatcaagagcctgctatgagtgtcaccattataggtggtagagattccacaatgaacaaaacagagtcctttcttacattttgtgaagggagaccacctctaaacaaatatatatcatgtcaggtagagataagtgccatggggaaaaacaaaatagggtaaggggctaggtggggcaggatcagaccaaggaatttatattttatataagattgtcagggaatgcctctctaattagatgactttttttttaatagaactgaaggacataaaaggacgaggcttatggatatctgggggaagatgtcagaggctgttataaaagttgcaacaggaaactgattaggactcttagcagacttatatgtgcttagaatgaaagggattgggataaaagaaaagaggggagctttgggaaagcattaaactgtggccatagcactgattggataaaccataacattggattatgggtctgcaaatttcttacattttttttaaagtgtcagacccatagccctagtaataagcaacatggtcttttctttgagcatagctgtaatgaacatgttattcttttggagttatcctgcaaagcttatcaaactcaagaagcaatagtttatatgcattgcccaggttgaatattattaatttgggttgggaagtgatatgaccacattctgactgactataggccctagttcagtttacctgattttatgcccaatttttaatgagaagggagcttgctaggccaggcaggaagaaagaaatggggacagtgtcaagcaggaaatgcagaagagttgagtgtaggtaaatcccatctttcctggctttacgttgccttcacatccctcataatgatcttctacctcagtcttcagtataagcagtatgttgttctaaaggtatgaagtcttggccaggcaccgtggctcacgcctgtaatcccagcactttgggaggccgaggtgggtagatcacgaggtcaggagattgagatcatcctggccaacatgatgaaaccccatctctactaaaaatacaaaaattagctgggagtggtggtgcacacctgtagtcccagctactcgggaggctgaggcaggagaatcgcttgaacccaggaggcggaggttgcagtgagccgagatcgcaccactgcactccagcctgagaacggagcgagattccgtctcaaaataaaataaaataaaataaaagtaaaggtatgaagtcttttccaagctaaggcaagaatgctgaaacctcaatcatagcacttttccaaaagagtcttaccttatattctggatctcttcattatctcaagaggggcttctttctctttaaatgtgaaaagaagagaggcatcagctagccctattagcccagggctaagaattgctccagatttttgaatgcttaaccttaaacaaagtcacatgtaccagtggaaagtggctcccctgttttcaaggacaggtcagattttaactacgtgcctcttaggcttgccctgtcttcggagttgttaaacatgcatgttgggagctgttgactgtttttttttttttttctttctttctttttttgccttataatttacttttattttaaatctattatactttgaactgttgactgttagagaaagcagtactggcttaggatcagcagagaatatggttgaattctatttcttaaactgaggagaatttctgtttgagcccagtccaagtcattacttgagcaattttttgcgcattttgctgcttaagtgtttattttttttttgcttttacaagtaattttttttaaaaaagttatcatacactcagcaaacattttttgagcacgtacacaatgcccagccctgtgccatgcatgttcaaaaaaaaaaataggtaacattatatctgtgcttgtgaaattaatacatttgttagaaagataagacttcaatcagtaaagcaatccaagaaggaacaagtacaaatccaggaaggagacattagctcagtggaaagagtccactgaggtaggtagacttgggtttgagtcagaagcaagagattgcttttgtgagatttcgcttatcctgtgtgggcctcagcttcctgttatgtaaaatgggataatagtacctattacattgtcacattggattgctgtgatgacttgataatatttatatacaaagcaaccagtataatgcgtgctcatagtaagcacttattatattattattatttattggacatataattagaaggtctgggttataatcttgattctacaattatttagttttggtaagtcacttaactttatcataccattcatgcatattacctataaagtgaaaggaacagaggttctacaatttatctcccaaattccatggtattttgaaccaaaatgtattgaataagtatttgatgtttgcttccccttcttgttagtgatatttacaatagcaataaaacatcaatatttatttaggacttgctctggagccacgagccgtggtgtgttcttgacattatgttatttactccatgctgcatactcagtgagacagataaccttgtcttgtttcctagatcctaggccatattttatccagtttaatatttctgaaatcagaatgtattatgtagtattatgtagttaataaatatatttaatgtggaatttttttcccaaaagccctttctaagtgagatggaccctcttatgatttaatgaggatgtcttccaagggaaataaatattttttctatatttctgatggtaaagttgaagcatagagaggataatttacatgaccaagattaatgaactaacaaaagcaaattcaggacttgaacttaggtttgttttatttaacaatgctcaccctaccgtacttcttgggagcaaaaaatttaaaaagtttctaacatatattcattagttctttccattttttatagcaaaatatatttgatctgtctctagaatcaatgatagattcactatttgttaacttttaacaggaatatattttagtccctctagcctgactttataggctatgtacccagtacatgaaaatatatagtagcctcagtttaatgttgatgtttatttgatgtcgacatcactagtgacactggtcaagcgtatccttttagataagagcctattagaattatatattccctgtagaaatcttaccttgaccatagtacatttaacagcagatttttctcagactttcaaaatcctgaaagtctgggtcattacaagaaaacaaggatgtggtcataaacagttgattattaagcaaattcattgaaaattaacagcagtattctttgacctcactctttatagccaaactgctaatcttgggtaaattataagattatattactaatccattgacatttagcacaaattagctatcaaatgggtcagttgttactgttggaaacttatgaaaatacattaaagttcttcccatttcctgtatgtttctttctctgacacagaatcttagaggcttttattaggctgggagaacttcccaaataatctaatgactagttgaataattgtttatgatataaaatcagctttgttgtcagaatgattacagtttcagggtcatagttaatagaaaaatatttcagtgaaggttaccattagtcgttgtaagtatcccttgattcaagaagtgaaacttttattgaaaaaactatttgcagagctggagccctgatgggcctttctgaagtttttaaaattaagaaatcctatctctacttttaacaagacatgaatgttagtatattcacccagactaaatgaatgaatgaatgatcacattacacatgcttgggatttgatttccttcctctggtgttcactggactagcagcttcagtactcaagtgcgattgtaaaattacacatggtggaattcaaaatggtgtacatcagtcaggtcctggaaagacacacaatctaactcagaagtttcaagagacttcaaggggaaatgtacagaagtatgggtaggattaaagtagctagcaaggaatgctgagtcactcggaccctagctgccatgagaagctattatctcttctggacctggagctgcagaagaaggaaaccgtgttactctagtcctgagagggccggagccatggaggaggggtcttgtgacagaagctaaagttctggagagacataggctaggccagagcataggaatgtggggaagacatccctgacctctctgtcaaccttctaatctccattgttcaaacccagtaggaagttatccagcattgagcctggagagtcagcccgcagcagtcagcctcctgagtgcagagcagaggaagacctggaatggatatgctataggaggagggccaaacagagagtaactagtccagatgggaaatgctattttagacctcatacactgccaaaaaagaatggcatattcaaggaatccaggaccttgacctcatttgatcttggatttgcatccattttctgatactttcttccaaatactcttgtaagcatctgacagcagccaggagaattgctggtcagttcagcctgtcccagcttcattgctgaggtacatatgtggttaaggagctgagagaactggtctgatagctcaccaaagggggcctttcccaaggaaaataaaataaagagaaaattcattgagaatctgtccagaaaggacagtaagtaggcatggaatcatagtagtaaggaagcatggaggaggcaggtgcataaaaatgacttgtgatatttttgaagctatatgataatgttctgacccacactcttgccagcctctgcaatcttctggaggcttcatatgaaagcaggattggtatgctgtttattataaatagtgagacctgagagatgattactgtcagcataaatggatattacacattgcacctatctcccagcaggaagtttgtttgtttgtttgtttgttttagacggagtcttgctctgtcgcccaggctggagtgcagtggcacgatctcggctcactgcaagctgcgcctcccgagttcacgccattctcctgcctcagcctgccaagtagctaggactacaagcgcccgccaccacgcccggctaattttttgtattttttagtagagacggggtttcactgtgttggccaggatggtcttgatctcctgaccttgtgatccacccggctcggcctcccaaagtgctgggattacaggcgtgagccaccgcgcccaaccagaagtttgtgtttgatgtcactgttgtttcaccaatttaaaagaaaatgaatatttttaaaggaaaagaaaaaagttatcacactatgtgatgaaatttgtatctatgggtggttatttgctacttggtaaataattaaagcctgtactggttacctttcctttagcagctgacaacaaataaacatcctcacctcacaccttatacactttactccatggttcattttcagtattattttgtacttctcttgcttcatcatactattgcctggcaaaattccaacccagatttaatcctgctttccatctataccctgcctacacctgagagttcaatgttactgtggaaaatgcacactgtggtgacttgtttcactttaaatgcatgggccctaacctcactgagccatttattagtaatgattggcaactctccatatttcttgaatccactcactttcctagtctcctggacaactatgtgacaactcctctatcctcaagcctccaacaattacttctcataccctaactctgcgcagataaccttttttcctatttcactgcaaaaagcccagaagtaatcaaaagtgaatctacaagcttccaccaccacatctactcctcccagtctcagtgaccatatggtttgccttccttctgttaacagagagcttctatcaaagatgaacctctccacttggcactttatttccctcttgcatattcaaggacattagctcagcaattttctttctttctcctttcttgcattatttattttctccctccaccagaagttgtcaccccaacttctattagaatgacttaggaagtgcaggcctcaaaccttttttttttttttttacacgtctacctctattagcactccctgctcctattttaggaatccaggctttaacgctaacagttacaaattaagccacaagctttgtaagtatttgcctgtgctctagctgctagtgggtttttggaaaatcagtatctgatgggcatttgaatacatttgctcttgtggctttaaacaatgtctgtacaataaaaacttgagaatttatctcctctgaattctagacatttctattcaactacctagctggcatttccacttgcatgccttaaaggccctcaatcttatctgtactgaatcgatcacccccctaactgcctcatccgtcagttatccccattgcagttggtgacattccatcctttggttgcttgggttaaaaaatgttggagtcccccttgactcctttctttctctcatttcccaaagccaattctttggcaaatagtaaccatttatcacattttccactgctactgttctggtccaagccaccatcctcattcacttggattattgcaaagacctttacctgttctatatgcttttatatttgctcatttttctcccttcacccctattttgctttcagcacagtatatcatctcatgcatctactcaaagccttctaatgccttcccatttcatgatggcctataaagccctttgtgatctggttccctgaaatccttgacttcatttgggcagatgtttctgctataacgctatttatgtgttctgtaaaactttttggtctgcaagatgtactttgaaaaataacaggtcttatggtaaaattacgattggaatagaacactcatatcttatacaacataaaaaactgtagcaataaccaaagcaataatagataccttgggagataacaggaaggcaggcagctcagattgactgaaggcgactcaaggaatattaaaaatgcacaaaaacagtagcatggagatgccggctggggagctgagatgagacagatgaatggagctctgagccagagggcctaccacaaaagtggtcataggaagaagttcagcctgccttgagcagatagctttgcctggtgggagagggcgtatttcttgggagacacctctgggtgcaggcgctcatctttaattcccttaagagagctgaaatcactgcagtctgtgcagcagccaacttcagggatttttcctttcctgctaaggttataattctgttcttgctattcttactcctcttgcctaagaaaaatcttgtttccatgtaataccaatattatcccactatttaccagtagcatatgagctgcttgctgttacagaaacacatgctgtaatagaacagactgcactccttgggtcatctttgttatttcccatgtgtcaggtgagcacccaccttgtgacttttgctactggtctttccctgcctggaatgctttccctccagaagtcctcacggatttcttcttctatttcagttctttatttaaaaatatttttcatagtttgaacctctctaaccagctgatttaaaagaacaacaccaccccaacaacgttctctactttacatcatagtttaattttctccatagtatttatcatcatctgatatattataatactcatgtattggctgaaccacatccataagtattaagatccgtgagggcaagacttgtgggtttttaaacttgttttcctcctttgtttttctctattatatctttagtgtctggaataaggttcagcacatacaaggcatttactaaatgttgaatgaatgaatgaatgaagctcaagctccatctacaaacagtcctctgttttttgttttttgtttgtttgtttgttttttgtttttgttagctgttatctggctgttttttattagataataatttgtcttcctttacttactgattttgtttatgtgtttgcaggtgtgtgtgtgtgtgtttgtgtgaaagaggagaatgacttttatcaaacctggttttatgtcttccttaggatgcatcagagtttcatgctgttcacactacccttcggggtattcagacatttaaagtcttaatatttcagcaataaagtcttaatatttctggcctggaaaaatactgtgatatgggttgaattcatctttttgcacccctctatcatcataaccactccctgctcccattctaggaatccaagctcttatgctaacaattaaaaattaagtccacagactgcagatagaccctacgcttgagctgccggtgggttgctgaaaaattaatatttgatggaaatttgaattaattgcctctttaccccctaccaatccctgtgtatggtcaaaaaataggacattccaatactccacagtgatggccacagtgctggtttgtgctgatgttataaaggagcaggaagatggtaatgaactccctctggtgctggacaaggcttcacaagggtgctgatgaaaacaatgtgagaaaatggactcaggggttctcaaggcagagaatggtggggggatccaggaatccacatattcaaagacacaaagaagtacagatttctgaggtgttcagggaatggtgattcattaggtatggggctgggggtggggcacagggtaggcagaggagagagcagtaggtgtatatgccatgaagattttggaatcgatccaactatacagctatcaaaggtttttggtgatacaaccagattcgtcttctcactccttacctttctcacctgatccctccctggcttttccaaactgtcaactataaggctgtgtgaccagagagcatgcccctgtccccagtactcagataagtgcctgacatatatatatatacatagacaacctacttgtttatgtgtctgaacaaactatcaatattcatttctgcattttcttttcagcaatgcttacactgtcttcaaatcctttagggccctacacttgactatcaggctgcctattgaaaactaactttacaggttgttcattggttaccatgatggcacaagtaaccattcagtaactttttttttttttttaactagaattgaaagctttgatccattctctttttctggtctcatttcccttctaccagatctgattcatggtgcaacttttggtggcatcaccccttaatccagcaacatttttgtataccctgaggttattactttgatgtcctgaacttatggctctgggggatatttttttaaaggggtcagagaaataaggttgaattagagagattcttagaagtttatgattaaaacactatcccctctgatctgagtcccagctctgccattgacaggttgtgtatcattagcaatagcaagctacttcacatttctgaatctcagttgattgagcaaaatttagataatcaaagactactggagatgtgatgctttgacacaaagaaatctacctctttggtgaaatttcaattgtgtaggagcagttatttgggagaaaagtgccctctcaccttcttaaatcatctcctagggctataataggaaatacgcagcttttgctgagaacccaaatgacattgtggattatccagctctagtcttctctctcccatatagaggccggttatctttgtcacttcacagctcattagcagccccactcagggccatggagaggaaatagatgagatgaagcttaaatatgtcacattggttatttcttagcagctctgataaaaggcttagcaggggccaggcgcggtactgtacgtctgtaatcccagcactttgggaggccgaggtgggccgatcacctgaggagttccagcccagcctgaccaacatggagaaaccttgtcgctactgaaaatacaaaattagccaggcgtggtggtgcatgcctgtaatcccagctactcgggatgctgaggcaggagaatcgcttgaactcgggaggcggaggttgtggtgagccaagatcgcgccattgcactccagtctgggcaacaaaagcaaaactccgtctcaaaaaaaaaaagcttcagcagggtgaggttaaaactcaaataaagaggtctgaggattatctgtgatgttagctcatgtgtgttaccttcctgtcttcccttctttgttcttatttctagggattagttgactgcaaacattaatgggttaaatataaaaatgactgcaaacattaatgggttaaatataaaaaatcttttctatcctgaaggtctttgaaaaaatgattttattacttactggaaaagaaaaataaaacaaagcttgcttcacccagaatttattttttcttctagttaaaatgagcaacttctttaaccagaactgaccttgaagacaaatggctaaaataaaacatttgctgaattcactgggcgcatcttacaagtaatttttggattctgcattgactacctacaagtgccttctgggtgcaagtccacaggcaagatttgttctgcaaatcttccatgaccaaggtcacctctttggattggcagacccagggagtccatattgggaagataaattcacacttcaccccttgttgagatctccagccttgctcctctgataaccaggtctctcttctgtcctattataatttatgacctttgaaaagttacttatatctggggctattcaaactcccagctatctatgaccatatgcataaatggttctagatttaaaaaaaaaaagaagctattcagagatattgggataccctataaccaatataaatgggtaattcagcagaaccagatgctggggttgagaaatagatgtggacaattggggcagggcctaagaaagatcggaggcaaagacagtgactagatggggagctctgataaggtaatgcccaggcctgtgcttggaattctgccacagtggggacattagtgggggtctgtagtcattgcagggtgagaggaggatagaaagaaaagattgtgtgaaggtcagtggaaggtcccccatttcattgctaagagaactatgtatgcacgttttcctgtgtttagtctcacacataattgtacctttaagaactgatcacacactgcatttccctggcagtttttggcatctcagatgaggaagagtgatgggcgacaggtgatggtgacaactattaataagatctgaaagtaaacagtctcatgaaaggtggccaggagagggcagtcaccttttatcaggagcacagactgaatttgcaaagggtacttaagctacaagactataaagcatgatgcaggcttaaccaaaatgcagtgtcttgagcatagtagactcttagtgtatgtttgctaaatataccttagctgctgctgttccccagagctcatcagagttccatagaaacctggtcccttccagaaaaccaaagaatgactaaagaaaagtgattgcaaatccagaaagcagctttgccttactggttggtaacagcaggattttcttttccttgtagtttattttggcttaggctagtgtctctttcatgaagacagctactatttacaattgttgttaacatgtttttcctttttcatctcccaatatactctcttcctgtcgttaaacacagtcaatttaccaatggaatctgctttataagctcctgcattttctttttccacagatgggattaatgccattatgttctatgtcatccacatagtcttggcttctaggcaccaaggtgttgttctagaggaaagaagagtaatggtcgacacaggcaggctgagggctaacctaatgatttcatgcatttagtggtaattcttaattaagatcccaattttattctgttggatttagtctataacccgctgaaaatcattcttgaattaacactgggtggatataaaagcagaaagccaaggactttgcactgttctcagctgtagctgtttatttagctggagaaaatttagtgggtggtccaaccttcataaccaggaagaataaaatagaggtgtaaaggccttggtggaaggagggcagtagcaacctttccatttcttcagttttatcgcagcctatgaaattagttccttaggtatgttgatcttgtaggagctagtattttaacatttgctccatcaagttgtttggtttaaatctaagaataagcccactgaaaactattcctaatttgtgaaacgaataacaataatagatgttaatagaaacaaagacttcatttggttagtttttagagggggcacagagaatgtagtaacataataagttagatttttgttgttttctttttcttagttctttgtagtctttataatctctaattggcatttgctcctgacttttctcagtgtacttccacatggaagagacaaaagtctcaaagctggtgtagaaaaacccttaataaattgcccattaattagccaccttgatttccacctttaaagcagttaattgaagtaagaatttgttagatttttctcaagcatagcagaaattaagattaatttcttaggtgtcattgctacttgcctacttaaaccaccagttcatctttatcataaatacttaagccaaaagtcacattagaggcaatatggcacagtgattgtggaccccggagtcaggtgagctggttgaaatcctggcttggctacttcccagctatgtgatcctgggcttcagggttcccttttgcaacatgacatgattgctgagctgcttcttagggttgtgtgtggctccggtaagataatacaggaaaagagctgaaagcagtatctgaccctggagagaaagtagggaagagacaatagaggaaagaggacaaggaagtgggagatgaagagaaagttcaagaaggaaagtggaagaatctcaaatagaaagttaattttcagtttttcctgagaagagatatatagacatcttcatgtggctttggagagccttggagcccatcagcaagacggttggaaattatactgaaacagaagtgtagacctatgtgacttatgtcctggccagttgcctcatgtcctctgtggtcaggttgatctctactggcactgtcaaaagattttttatggacagctggttggggtaaactttgaaacctgattgtttgcacttgagtgccagagtgtgtaattatttaccggtgttcactaaggatgtcagtgtagatttttagggggagaaaaaacttaaatttaaaatttggaggcatctttttcagtctgcctgccctggtgtttgttataacacttagtttggcatgtaacagctgaagctactggttaaatcattaagcatttattattttaaaactcctcttctcaaagcaaaaaataactatcatgttgaagttctttcctctaagaatgacatttactgtgagttttataccaatggactaattggagggttgagaaaataaattttggaaagacaacaataacttcagaattttccttggatggaggtttcctttttaaaacctgaactgagctttatcaaaacagtaactgaactttgaaacgaaacaagagtgctgaattgaaagctccaggaaggcagggatgtgtctgtgttgtttatgactataacctctgggcctaaatcagtacctatcccatggtaggcactcggtaaatactgaaggaatgagtacagtatgaaaattagcatggctgatccttggaaaaaatataagtcaaaagggaatagcatgcatgtgtaactaaaacatcagtccacatgcttgaaatgtcatcacttttttatggtcaggacctgtttttttctgctccaattaaagaagaaaattgtaatgtgaaagaagcaagaagtgaagtatttggtattcatgtgttttgacatctgcagtaagtttaaaataaatttctaaatcttattgtattgaaattgtatgagtttcttaagtggtattattcattcagacttaaagtgaagttaggttgctgtcactcatagtggacttttttttttttggcattattaaaacaacatgtcttctgggtgttgtcttgtattacaaaagcttgcgtgttttctcttgatgctgtgccctgtctgttgccattgaggggtctaaggaccaaatgaggtcttgtttccttcctgatattcttttgaccagtttagaatatgccaggtccattcacacaactaagcggctcagttctctcagttccctggtcttctcatattagattgttatctatgagcttgaagtttagacatgaaaaagaatggttgtaatcctcttccttctctcaccctcttccctttttttcttaagttagccttttgaattcatgattctaataattaatatatattattatataatatagtatatattcataataatgattaatgatagtattaataattctgtgtgtgtgtgggcagctactcatacagaggaaaacagattgattagtggaaattacattaatttcataacttcttattaaaagagtttgtgtgtgtgttgttggttgtttgttccctttgcaactcaacatggtcttcttgaggtgtagggaaaacatatgcttaggaaacagagccttcttttctccttttggtatggaagacatatgcaaaaagaatgaaggaactaattgtctctagccagggctctgcaaaaatagtactggtagagaaaaagctctaaaagaagtaaaagtttatagtgctttctcctggcagagttaacctcatcttcatcagcttttcccctgcctcagagaggcagttttggaatgaccaaagcagagtgcccaacctctctgttcagagttagcgagcatttggatcactctctctctctgcctcagtatgagtggaatattgcatgaccatttctgatttctgccatgagcgcactcggcctagatgaataaatcctccttgaagaaggcggggcattttggcattcacaagaaaccatgttgatatctgatcctcccactggagaaatgtggcaaagtgagaaagactcactctttgggactccaaaaatgtaaacacaagtaagcatgcaagctgaagaagtcacttgaaatagaaaaaaaaagtgttaaactctctgttagtcatgtgactttttcttggtattcgagagccaggaggctcttgtggtctaatctggaaagagtcgctaatcgctgtgtcaccttggcaaattggttgatctccctgtgctggagtgtttagtccagctgctggatgggatgaaagcaagacctcactgaaaccagatgctgtctctctgaaaagatttcagcaataaataatatcgtatatactttgttcctggcagcaaatactgaactgctataaccctctgttttcacttgcttctaaatttctggaaatatctcctttgggcttgaatttttccatgcttgtcttcagcccaaaactttttggaaagtttgaccaaaatttcacttagctgtttttcctgaattatgggagaataagggcaatgcattgtttttcagctcataaattctcatttttcccattattcctcagaaaaatagctgctacatttaaagtgtttagaactagtaaaagaatcttggtatggtaaagaatactggcagaagacaaatttaagtctctcagtatttccttctaactttaaacatgactgcacacaatcagggcacacataaaaagctctgatgtagttttatagatggccaaagagaagattctgcaaattctctcagtaactcatcccaagttaccaagaggcaactttagctaccatcagttgttacctttctcaaccacttgctctgtctgtggatctgatttctaaaaaaatgtcatggttatatgttggcattgaccccttatctacattttaaataaagttgaccatttcttttaggtagccttcatgtgtgatgacctcagtcatatctgctgacctactagactcaaaattcctttacagcagggcctaggtctgtctacctcaccattgacactgtagtgctcagcagggtatgacacatgtagtaaaaactgattgttgaatgaattaaatgaacataagtacagttgtttttgctgcaatttgttcattgatttgtccactaagacatgcatgcatgtattcagtgagtatcactgagtctctactttatgccaggtattggtatgaatgttgtgaatatttctttgctttgatggataacacagaagttttgctgatacacaacaaaataattatattatttgagtacaattactatgcctatagttggaatattagtccaatatagctaaaggcaatcccagggaatttatcacttactgagcgtccatgatgtgcctggccctgtgttaggtactgagaagagatcaattagacagtttctgcaggaagtcacacataggttaacagtgccaagacaaatcctaaagtacctattatacaaggggaactataataaagagccaggtgagttgaaggcaggagaggtatcattgtaccacaagataccttgtgatcttgtgtaaatcccctgaacaatcaggaaaagctttatggcatagctttatggtcagagatctcatggggacaggcagttagttgcaatgccttttatagccacatccttcactccttaaccctgcactgtctgccattcattctctctgtgctttcagccttgagaagctggccaaatttctcaggactggaaaataaactggaatgacactcaggcacttgatatcaagattattagggtcatgattgtgtttaagaccctaagacctcttgatgcttttacaagaatgggtactttttttgtccctgttttcttcttttgccccaagtttcaagagcatgttacagcagcagtataagcatacacaatcaaaggtgattgaagtgaggacaactggctcaatgagctccagccacttcaactctcctcctagtccctgtccccttgcccggaatgcttcaccctcagactttgacatagcaggcttctttttgtcattcagatctcagctcaactgcaaggatttctctgacctgaagttacatatgtgtcaccccttctggtctccgttgctctctatcacatcacctattggactacctttatagcatttatctccacctgattgtgtccttttcactgtttttctttaaactttttattgtcaattttctttcactagatgccagttccatgaagtaggaaacctttaccactggtcttgagtgctcttgaaagtgtacgtgtgcaataggcactcaaaaatgtttatggaatgatcagctggatgcgtatatggcaagtggcgagaagccaagggaataggacaagagtcctattgtgctccttgcctgaagaaaacctcttgcaagaatcataggctgttcttgagggtgcctttgccttggattcgccaaaaattcttctgtttcttttgtgtgaaaattttcccctcatacacagcaatgggcactaagaatgcatatatccagacttttcaggttacaggatggcatctcagatatagtcttcctttgatctatatactatgaagccataattgcttagccagtatctttttcaggatttactccatatttcttattctaggcctttcaggtggcagctgcactggctttcagatataatttagaatttagtttcggatttgtaaagctactcatgctgcagatcttctctgaaacatttctgtcacattttagaaagctttacattttcatctgctaacgattttcatctgccaaagagcccatctacttaaaaagcagatcactgaagccacacttggcacatattactttggcttattttcttttgatttttttgctttgctgggattacttatttatgaagaaagagagaatattgacttcttattttagaagagaggatattacttgggttgagagttctagttatataaaatgtatttatctaagttgttaactatatcaaaaatggagcagtcaatctttggaaatagttcagggtgaaatgtttttagcatgttcacatattctctttgctgtttttaaataatttggcaaagcttatttgcatttcccaaattaacaattttggccaagaggaaaagctaaagtgttggtttttctcagctcaactttttgggtgtaattaatttataagcaagattttatgaagggagaacagataggacctttctacaaagtccctgagccaaaataaacaccccattgttccatcgttttgtattgcacataggaaaacatccatccctatcattattctgttaaagggacacagattaccagatttgtaattttaaaaaaggccatttgttgattgagccactttgcgtataaagggtggtatatgttgcctgccgaatttctgtacaagaaaaaaatcatatatcaaaaaaatttttctcattcatcatataagaaatttatgcattttagtatgtaccagaagaaatggctttggcattttctgtttttagcagtctgttgaaatttcttcattaaagacattttctgtttgaaggttaaaatgaccatataaatacagattaattcagttttaataggtgcatcttcctgtcatttaccactttctctcctcaatatcagctacagtgatcaacatatatttagcagtgaaactgatatattctgtttatcttcaaatcataagctttttgtttaaatacaaaggaaaatcttatacctctgattttaatatgacaaatcaaaaagtccacaccaaactcccaactcatcccaaaaaagagattgctatctactcatcactgttctctgcttctaagatttgtttcccttggggttactgtttgagcaacttttcttacttccaagattgtttttgtggttttaagaaagaatctgaattccaagattatttttctggttttaagaaagagtctgaaaatctagagattacttaccttgtggtgaggtggttgtctatgcttctgttcaacaaaggcctcatgtactgaatggaaaaaaagcatcaggacctataattttctaggcattatgcaagataatagaggagacaaaaatgatgtcttgcttcaaagtcttagatctatttccctttgggggttgaggaatgagaaagagatttttagatgaaaaacaggaagcccaatgaggacgtgtggcaatagttcctaaaatgagcaaagagataaatttactcttttatatgattacaaccaaatcacacactggtgagtttcaaaacagtagttttcatttagaaagcaaattaagtggaataattcaactgagtttcactgcaatgggattcattctagatggttcaactctggaattagaaacaatatctaaggatgttgctgatagtagtcagcagataaataccagtaagtcgtatacaggtatacatcattttattgtgatttgctttattgtgttttgtagataattgtgtttttacaaattgaaggtttgttgcaaccctgtaacgagcaagtcttctggctccatttttccaatgacttgtgctcattttgagtctctgtgttacatattggtaatccttgcaatgtttcaaacttttttattattattatatctgttttggtgatctgtgatgagtgacgtttgatgctattattatgttgttttggcacaccatgaattgcacccatataaggtggggaacttaatcactaaatgttgtgtgtgttctgactgcttcactgaatggctcttcccctatctctctccctctcctctggcttccctattccctgaaacacaacaatattgaaattaggagcgttaataatgctacaatgacctctacgtgtctgatatggtttggttgtgtccccaaccaaatctcaacttgaattgtatttcccagaatttccatgtgttatgggaggcacccagggggtggtaattgaatcatgggagccagtctttcccatgctattctcatgattgtgagtaagtctcactagatctgatgggtttatcaggggtttccacttttgcttcttcctcatttttctcttgccaccaccatgtaaaaagggccttttgcccccagccatgattctgaggcctcccaaggcatgtggaactgtaagtcccattaaagctatttttgttcccagtttctggtacgtctttatctgcagcatgaaaacaaactaatacagtaaattggtaccagtagagtggggtattgctgaaaagatacccaaaaatgtggaagtgactttggaactgggtaactggcagagtttggaagagtttggagggctcagaagaagacaggaaaatgtgggaaagtttggaacttcctagggacttattgaataactttgacccaacagcctgataacgatatggacaataaagtccaggctgaggtggtttcagatggagatgaggaacttgttgggaactggagaaaatatgactcttgttatgttttagcaaaaagactggcagcattttgccctagagattcatggaactttgaaagtgagagatgatttagggtaactggcagaagaaatttctaaacaacaaagcattcaagaggtgaatgcttgggtgccattaaaagcatttcattgtgaaagggaaacagagcataaaagttcagaaaatttgcagcatgacaatgcagtagaaaaggaaaacccattttttgaggagaaattcaagccggctgcagaaatttgcatgagtagcaaggagcctaatgttaatcccctagaccatggggaaaatgtctccaggccatgtcggagaccttcatggcagacctcccatcacagacccagaggcccaggaggaaaaattgtttttctgggccaggcccagggtccctgtgctgtatgcagcctaaggacttggtgctctatgtcccacctgctccagctgtggctgaaaagggccaacacagagctcaggctgtggcttcagagggtggaagccccaagccttggcagcttccatatggtattgagcctgtgggtgcacaaaagtcaagaactgaggtttgggaacctccgcctagatttcggaagatgtacggaaatgcctggatgcccaggcaaaagtttgctgcagagttggggccctcatggagaacctgtgctagggcagtgcagaaaggaaatgtggggtcagagcccccacacagagtccctgctggggcactgcctagtgaagctgtgagaagagggccactgtcctccagaccccagaatggtagatccaccaacagcttgcactgtgctgctggaaaagccgcagtcactcaatgccagcccatgaaagcagacaggagggagactgtactctgcaaagcctcagagtagagccgcccaagaccatgggaacccacctcttccatcagcgtgacctggatgtgagacatggagtcaaaggagatcatttttgagctttaaagtttgactgccctgcggcatttcagacttgcatggaccctgtaatcctaatcctattgttttgtccaatttcttccatttggaacagctgtatttacccaatacctgttgtatctaggaagtaactagcttgcttctgattttacaggcttataggcagaaaagatttgccttgtctaaggtaagactttggactgtggacttttgggttaatgctgaaatgaattaagactttgggggactgctgagaaggcattattggttttaaaatgtgaagacatgagatttggaggggccagggccagaatgatatggtttggctgtgtccccacccaaatctcaccttgaattgtatctcccagaattcccacaggttgtgggagggacccagggggaggtaattgaatcatgggggccagtctttcctgtgctgttctcatgatagtgcataagtctcctgagatctgaggggtttatcagaggtttctgctttcgcttcttcctcatttttctcttgccgccaccatgtaagaagagtcttttgcctcctgccatgatttggagggctcccatacatgtggaactgtaagtccaattaaacctctttttgtttccagtttcagatatgtctttatcagcagcatgaaaacaaactaatacagtgtccaagggaaaggaaaagtcacatgtctctcactttaaattaattaagcttagtgaggaaggcatgttgaaagccaatataggctaaaagctaggcctcttgcaccaaagagttatccaagttgtgaatgcaaaggaaaagttattgaaggaaattaaaagtctactccagtgaatacataagttattaaaaaaaaaaaagtgacacagccttagtgctgatatggagaaagtttgagtggtctggatagaaaatcaaaccagccacaacattttcttaagccaaagcctaatccagagcaaggccctgactctcttcagttttatgtaagctgagagagaaagctacagaagaaatgttggaagctagcagaggttggaaatttaagaagccatctgtgtaataacataaaagtacaagatgaaccagcaggtgctaatttagaaggtgcagaaagttatccagaagatatagctaagatcagtgatgaagattactaaacaacagattttcagtatagataaaatagccttctattggaagaatacgtcaatagaagatctaagactttcatagttagaaagaaaaagtcaatgctgggctttaagacttcaaaacttcaaagggaaggctgatcctttttttatgagttgatgaagttggtgactttaagttgaagccattctccccagccttgctagagaaaccaaaagtcaaattcaggaaatacagagaacccctgcaagattctacacaagaagatcataccccagacacataatcatcagattttccaaggtcaaaataaaagaaagaatgttaaaatcagctagagagcaagggcaggtcacctacaaaaggaaccccatcgggccaacaacagacctctcagctaaaaccctataagccagaagagattgggggcctatattcaacattcttaaagaaacaaatcttcaaccaagaatttcatatccagctgaactaagtttcctatgtgaaggagaaagaagattcagagaagcaaatgttgtgggagtttgttagtaccagacctcccttataagagatcttgaaaggagcactaaatatagaaaggaaagacagctaccatctaatactaaaacacacttaaatacacagaccagtgacactataaagcaaccacaaaagcaagccagcataaccagctaacaacacaatgacactatcaagttcacacatatcaatactaaccctgaatgtaaatgggctaaatgcctcacttaaaaggcacagagtggcaagctggataaaaaagaaagacccaatggtatcctgtcttcaatagacccatctcacatagcctcaaaataaaggggtggaggaaaatctaccaggcaaatggaaaacaggaaaaagcaggggttgcaatcctaatttcagacaaacagactttaaaccaacaaagatcaaaaaagacaaagaagggcattacataatggtaaacggttcaattcaacaagaagacctaactaccctaaatgtatatgtacccaacacaagagcactgtattcataaggcaaggtcttagatacctacaaagagacatagactccctcacaatattagtgggagacttcaacactccactgacagtattagatcatcaaggcagaaaattaacaaagacatttaggacctgaactcaacattggactaaatggatctgatagacctttacagaactctccacctaaaaataacaaaatatacattcttctcatcaccacgtggcacatactctaagattgatcacataattggaaacaaaacaatcctcagcaaatgcaaaagagctgaaatcatacaatttcaaaaatcagagggcccttaagaattatgctaaatctactctgtctatactctataaatggaacacaatacatgtgtaatagtacacctgtttacagtatggcttgctgaatattttaaggccacagttgagacctcctgcacagaaaaaaaagatttttttctaaatattagtcctcattgagaaagcacccagtgaccaaagggctctgatggagatgtacaaggaggttaatgtagttttcgtgcctgttaacacaatgtccattctgcagcctatgtatcaaggagtaattttggcctttaagtcttattatttaagaaatacatcttgtaaggctatagttgccatagatagtcattcttctgatggatctaagaaaaatacattaaaaaccttatggaaaggatttaccatcctagataccattaaaaacatttatgattcataggaggaggtcaaaatatcaaccttaacagcagtttagaagaagttgattccaattctcatagattactttgaattgattcaagacttcagtggagaaagccgctgcaagtgtagtggaaatagcaagaaaacttgaattagaagtggagcctgaagatgtgactgaattgctacagtctcatgataaaacttgaacagatgaggaatcacttcttatggatgaacaaaaaaatagtttcttgagatggaatctactcctggtgaagatgccatgaacactgttgaaatggcaaaagatttagaatatgacataaacttagttgataaagcagcagccagatttgagaagattgactccaattttaaaagaagttctgtgggtaaaatgctgtcaaggagtatcacatgctacacagaaatcttttatgaaaggaagaatcaatcagtgtgtcaaactttactgttgccttattttaagaaattatcacagccaccccagacttcagcaaccaccaccatgatcactcagaaggtgtcaacattgagacaagactctccaccggcaaaaagattatgactcactaaaggctcagatgatgattagcatttttagcaataaagtatttttaaattaaagtatatacattgtgctctttttagacataatgctcttgcacacttactagactacaacagattatacacgtaacttttttttttttttttgagacagagtcttgctctgtagcccagtctggtgtgcagtggtgcaatcttggctcactgcaagctctgcctcccgggttcacgccattctcctgcctcagcctcccgagtagctggaactacaggtgcccaccacaatgcccagctaattttttgtattttcagtagaaacggggtttcaccatattagccaggatggtcttcatctcctgaccacgtgatccaccctcctcagcatcccaaagtgctggtattacaggtgtgagccaccgcgcctggccagacataacttttatatacagtaggaaaccaaaaaattgtgtggcttgctttattgagatatttgcttcattgcagtggtccggaactgaactgcagtatcttcaaggtatgtctgtattcaagtttatattttgacatacattcttctttacttgttaaaatcatggtcacctcattattatatgactgatcagaatttgcagggttgctttgaccatataccattgttctacaactacgcagatgtctgagtcctaaaggtgaatctgtctggccagttctgggtttaacggcctatataaaaagtagatgttacacaccttgtataactgaagcgccctatcacggacacagcttaactcttgggtgggtcacttagtctgcttggttgaggtttcagtgcttttcacatctacagaaatgtcctatttgtctaaggcaattttatgaagtaaatttactcttgtcatcctttccaacctgaaaatagaggatatataatttttagcattccattattacctaggggatggtcttcagtcattcttccctgaatttattacactggccctatcttcttcacctgaaataagttaaatgtagaattagcactaaagagaaatagaatgaacttcttccggaatgggaataggaaatgaaagagagtaaatcagaagtgaatcacttcttttttttttttttttttttttttgctttgcaaatctatatttttttccagctttatttaggtatgatcagcaaataaaagttgtatatattcaaggtgtatgacatgatgatttgatatatgtgtacattttataatgatcaccatgatcaaattaattaacacatccttcaccacacagttaccatttgtgtgtgtgtgtgcaagaggaggtaagggagtttaatcatttttgaacactagctacaacataattcaattaaaattctgagaaagaagaaaaattgtcatgcagctgtttaattttagaagcattaactgacaaaatccaagtcttatgatgaatactcagtcaaattttcatgaatgaatgggagcctttacctctgaaattgttgtcatggaagaaaacactaacactgtcttacacagtaattcaagttaccaattgagttaaagtagcaagatgagccatggttgtaattgagaatggcaactatggtgttcttatctaatctgctacctagtttgcctttttgctctaaaatggtgactatgttagaattcaaagaataaaaggcctttatcctttcaggggaaatacaagtaacaagcttaattttttttttcttaacactgatgaaactcatttggggctgtggaaattgctgctagcattgaacctcttattaacattcaaggtgtgccagttttgcacaagctgtgtcatattcagagatagattgttggcacaaactaaggcacttattctcttgttttttcacttctttcaataagaacagataaatatactatttctagataagcagttgaaactgttctgctcatctctttggaataggtttgtgggggtatcactgtatgacatgccgaagaaatatacaagggaaatgctcccgcatacattgagatataaatgaatgcctattttagaatacgtcatttcttaaaagtaaaataagttttggctgggcgcagtggctcacgcctgtaatcccagcactttggaggccaaggtgggtggatcacctgaggtcaagagttcaagactagcctcgccaaaacagtgaaaccccatctctactaaaaatacaaaaattagccagacatggtggtgtgcgcctgtaatcccagctactcagaggatgaggcaggagaattgcttgaacccaggtgatggaggttgcagtgagctgagatagcaccattgcactccagcctgggcaacagagtgagagtccatctccaaaaaaaaaaccaaaaagtaaaataagtttttaaagtcactgattctgtttctaaggaattctcagctggggcttctgagtcaattctcgatggttagaacttatgagtagcagaaaaagaaaactactatggattttctctacaatgatttgagacagtgaatggggctttctggcaggttagcagttaggaactcagatgaccatagacttttttttttttagagtgggtctcggtctcactctatcacccaagctggagtgccgtggtgtaatcatagctccctgaagcctcgacctgggctcaagcaatccacagatttttgaagttcaccctggattgttgtgttctacacagaggttccaccttttgctgccttttatggttactatattattattttgatgtttcttaaccagctgaatcacattgtagtatatgaaatatgttttggctcttgttttaatggttatttgctagcagatttcacaatggcccaatgaaacaacccattcattgctatttgttgcaattcatggtgactaaacatgactccatggtacggctcaccaaagtcttggtttatgtgtgacttccaggggagagagattgagaaccatctgttaatcattttgtccctaaactagagtttttcaatggagtacttgggcagttgaattagtatgtttctcgtaggctagtgagaaaaatagctttttttttttttggcattaatcagactgctgacccacatctctgggaatacttgtgacaagatccagcctgacaatatcacatatgatttgcttttcttcttggaagggacacattgtggcttttctctggaatctgtgaagaaaatgctcctgagcctagaaactggaactgagaaagctcttcctgatcatataacaataagtcttgtgagggtcaacccttgagccatgagggcagcttgaaggaacatggggttgagagtcaagtcatcagaacttctgtttatttttctgtgtaatatttagggacttgttatgtttaactctaggcaaaggtatagatttggaggtctttgatatagatgatagatagatagatagatagatagatgaaatatattttagcatacaaaggaggctacaatacacactcatgtacctgtcactccaatgaattcatcaaatgtaaacattttccccaaatctgcttcttagctgttattcgtaaagaaacaaattgtacagaaaaatttgaaggcccccgttttaccttccccagtctcattattttctctgccaccccagagaaaacaactgtcttgcataggtatttatataattctgttttatactttgccacttttactacatatatgaagcatgcttgttacatacatgaacataaaatatacatgttttactgtaagtgtggaatgtattctagaatttgctacttttactacaaatattttattttcagaatttacccttgttattatataaccctagttcattttttaattgccatatattactccatcttatgaaaataccacaatttatttattcccatactaatcagaatttgaattgatacaatttttaattaaaattaataatgctgaaagaaatgttctttttatacatttccctcagggtgcatgtgatagagttcttctcacatatatatcagtgtacttgctgtgtcttaggatatgtacaattgcatgtctattagatatgccaaattgctctgcaaagtactcataccagtttccactcctaccagcaatgaatgagaactttgtttcgcaggtcattgccaacacttgattattatcagatttaattatttgccagttgatggatgtgaattgctctatcactgttttaatattcattactttgattatttataacattaggtatacttttcatagggccatttaaatttcctctcatctgaattgcctatttctcctcttcgttgattcttctattatcttttcttctctttattaatttatagaaatgtatgtgtgatcctaatatgtgtcataatatctatgttcatatttcatatataaatataatgaaatacttgtctctgttatatataggttgaaaagtttgctccctatctgctgattgcattttaattttgttcatggcatcttttaacacacgtgatttttaattttgatatagttaatattttttattactctagattttgagaattgctcaagaaatgactttattttgcatagtcatatgctctaatttttttaatctacttacaatagttttatgttaaatatgtcaacctttgtttcacccggaattttttatatgtatggtataaagcataaatcaattttttttactattgagaatgcttttattatattatatcttattctattctatttttatttttccataagttattggggtacaggtggtatttggttactttagtggtgatttgtgagattctagtgcacccatcacccaagcagtatacactgcaccatatttgttttcttttatccctcatccccctcccacccttcccccaaagtccccaaattccattgtatcattcttatgcctttgcatcctcatagcttagcccccacatatcagtgagaacatatcatgtttggttttccattcctgagttacttcacttagaataatagtctccagtctcatccaagtcactgccattaattcattcctttctatggttgagtagtattccatcatatatatatagtatatgtatgtatatatatgtacgtatgtatatatgtatatatgtaagtatatatgtacgtatgtatatatgtatgtatatatatgtacatatgtatatatgtatgtatatatatgtacatatgtatatatgtatgtatatatgtacatgtgtatatatgtatatatgtatatatgtacatgtgtatatgtgtatatatgtatatatgtacatgtgtatatgtgtatatatgtatatatgtacatgtgtatatgtgtatatatgtatgtatatatgtacatgtgtatatgtgtatatatgtatgtatatatgtacatgtgtatatgtgtatatatgtatgtatatatgtacatgtgtatatgtgtatatatgtatgtatatatgtacatgtgtatatgtgtatatatgtatgtatatatgtacatatgtatatgtgtatatatgtatgtatatatgtacatatgtatatgtgtatatatgtatgtatatatactatagtttctttatccactcgttgattgatgagcatttgggttggttccatgatttttcaattgcaaattgtgctgctataaatgtgtgcaagtatctttttcttataatgacttctttcctctgggtagatacccagtagtgagattgctgaatcaaatcgtagttctacttttagttctttaaggaatctccacgctcttttccatagtggctgtactagtttacattcccaccagcagtgtagaagtgttccctgatcaccgcattcatgccaacatctactgttttattattattttttttattatggccatccttgcaggagcaacatggtatcacattgtggttttgattgcatttcccttatcattagtgatattgagcattttttcacatatttcttggccatttgtatatcttcttttgagaattgccttagcccactttttgatgagattgcttgtttttttattttcttattgatttgtttgagtttgttatagattccagatattagtcctttttcagacgtatagattgtgaagatttttctcctactctgtgggttgcccatttactctgctgactgttccttttgctgtccaaaagctctttagtttaagtcccaactatttatcttttgtttttatttcatttgcttttgcgttcttggtcatgaaatccttgcctaagccaatgtctagaagagtttttccaatgttatcttctagtatttttatagtttcacgttttagatttaagtccttaatccatcctgagtagattttttgtatgaggtaagagatgaggatccagttttattctcgtatatgtgactagccaattatccaagcaccatttgttgaaaaggtgtcctttccccactttatgtttttgtttgctttgtctaaaatcagttagctgtaatatttggatttatttctgggttcaatattctgttccattggtctatgtgcctattttcataccaataccatgctgttttggtgactatggccttagagtatagtttgaaatcaggcagtgtgattcctccagatttgttctttttccttatttcttgctttggatatgcaggctcttttttggttccataagaattttagaattgttttttctaattctgtgaagaatgatggtggtattttgaaggagaaggttttgaatttgtaggttgcttttggcagtgtgatcgttttcacaatattgattctacctatccatgagcatgggatgtgtttccatttgtttggtcatctacgatttctttcagcagtgttttgtagttttccttgtcaaggtctttcaactcttttgttaagtatattcctaagtattttattttttatttttttggcagcaattgtaaaaggggttgagttcttgatttgattctctgcttggtcgctgctggtgtatagaagagctactgatttgtgtacattaatcttgtatctggacatgttgctgaattcttttatcagttctgggaactttctggaggattcttcagggttttcaagttaaatgatcatatcatcagcagacagtgacagtttgacttcctttttaccaatttggatgctctttatttctttctctcatctgattgctctggctaggactcccagtactatgttgaagaggagtggcgagagtgggcatccttgtcctgtcccagtttccagagggaatgctttcaacttttccccattcagtattatgttggttgtgggtttgtcataaatggcttttattacattgaggtatgccccttgtatgccaattttgctgagagttttaatctgaaagggatgctggattttgtcaaatgctttttctgcatcttttgagatgatcatgtgatttttgtttttaattctgtttatgtggtgtatcacatttattgacttgcatatgttaaaccatctctgtgcccctggtatgaaacccacttggtcatggtggattatctttttgatatgttgtcagattcagttagctagtattttgttaaagagtttagcatctatgtttatcaaggatatcggtctgtagttttcttttttggttatgtcctttcctggttttggtattagggtgatgctggcttcatagaatggattagggagggttccctctttctctatcttgtggaatagcatcaaaaggattggtatcaattcttctttgaatgtctggtcaaattctgctgtgaatccatctggtcctgggctttttgtcggtaagcctttaattaccatttccatctcactgcttgctattggtctgttcaggttatctaatttttcctgatttaagctaggagagttgtatttttctaggaatttatccatctcttctaggttttctagtttacgtgcacaaaggtgttcatagtactcttgaatgatcttttatatttcagtggtgtcagttgtagtatcccccattttgtttcttaatgaggttatttggattttctctcttctattcttggttaatcttactaatggtctattgattttatttatcttttaaaataaccagctttttgttttatttatcatttgtattttttcttttaattttatttagttcttctctgttcttggttatgtcctctcttctcctcggtttgggtttggtttgtccttgtttctctagttccttgaggtttgaccttagaaagtcactttgtgttctttcagtctttttgacataggtgttagggctatgaactttcctcttagcactgcctttgctgtatcccaaaggttttgataggttgtgtctttactgttgttcagttcaaagaattttttaacttccatcttgacttcatttttgacccaatactcattcaggagtaacttatttagtttctatgtatttgcatggttttgacggttccttctggagttgatttccaggtttattcaatgtggtctgagagagtacttgatataatttcaattttcttaaatttattgaggcttattttatggcctatcatatggtctattcttggagaaagttccatgcactgttgaatagaatgtgtattctgcagttgttggatgaaatgttctgtatatatttgttaagtccatttgctccaagtacagtttaaatccattgtttctttgttgtctttttgtctggatgacctgtctagtgctgtcagtggaatattgaagtccccactattattgtgttgctgtttctctcatttcttaggtctattagtaattgttttataaatttggaacctccagtgttaggcgcatatatgtttaggattgtgatattttcctgttgcacaaggctttttaccattatatagtgtccctgtttgtctcttttaactgctgttgcttcaaagtttgttttgtctgatacaagaattgctacccctgctggcttttggtgtccatttgcatgaaatgcctttttccacccctttactttaagtttatgtgagttcttatgtgttaggtgagtctcctgaaggcagcagatacttggttggtgagttcttatctattctgctgttctgtatcttttaagtggagcatttagggcatttacattcaatgtcagtatgagatgtgtggtactgttgcattcatcatgctgtttgctgcctgtgtaccttggttttttgtttttggtgtttggtttttaacttgtatttttgtttataagtcctatgtgatttaggctttaaagaggttctgttttaatgtttccaggatttgtttcaagatttagagctccttttagcagctcttgtagtgctggcttggcaggggccaattctctcagcatttgttcgtctgaaaatgactgtatctttccttcatatatgatgcttagcttgctggatagaaaattttggactaataattgttttgtttgaggaggctgaagataggggcccaatcttatctagcttgcagggtttctgatgagaaatctgctgctaatctgatagattttcctttataggttacccagtgcttttgcctcacagctcttagaattctttcttttgtcttaactttagataacctggtaacaatgtgcctaggtgatgatttctttgcgatgaatttcccaggtgttctttgtgcttcttatatttagatatctaggtctctagcaaggctggggaagttttcctcaattattccctcaaatatgttttcccaaacttttagatttctcttcttcctcaggaacaccaattattcttaggtttggtcgtttaacataatcccagacttcttggaacctttgttcatattttcttatttttttctttgtctttgttgaattgggttaattcaaagaccttgtcttcaagttctgcatttctttcttctacttgttcaattttattgctgagactttccagagcgttttgcatttctataagcttgtccaatgtttcctgaagttttgattttttttctttatgctacctatttccttaaatttttctcctttccctgcttgtatcatttcgttgtatcagatttccttgcgttgggcttcacctttctctagtgcctccctgattagcttaataactaacctcctgaattctttctcaggtaaatcagagatttttttcttggtttggatccattgctagtggactagtattacttttggggggtgttaaagagccttgctttgtcatattaccagagtttgttttctggttccttctcatttggaagctctgtcagagggaaggtccagtgctgaaggctgttgttcagattcttttgtcccttaatgtagtactctccctattttcctatggatgtggtttcctgtgagctgagctgaagtgattgttatctctcttctgggtctagccacacaaccagtctacctggctctgagctggtactgagggttgtctccacagagtcctgtgatgtgaaccatctatgggtctctcagccatggataccagcacagtatttggggtgtctcctgcatcctgcaggagcagtccacttccttctgtgggtcctctcgggattcctgtttcattcttgaagtctagatctattttttgacagtctaatcctaacaccatttactgaggaacactctttttttcattgttctgtaatgcctcctctgttgtaaattaagatcccataaatgccttggtatttgctagactttctttttcttctgttgttttaaaattttctctcccaacaagataaaatattgtgtaaatattatatgtttatactaagcatttttatcttgtactgaataatagtgagaatgcttcaaaatttcactgtttttgctattaagtatgatattaagtacgctattaagtactgtataggtttttggctgacttatttttgtcaggttaagaaaactgctctctatttctagtttattaagacagtttatcacaagtattagcctataaataatggtttttctgcacattcgaataatcatttgattcccacttttaaattattaatgctgtagattatattgatagatctgcctgatattaaactatccttgcattcttgatctaaatcttacttgaatgggatgtgttactgtattctctctctctctctctctctctctctctctctctctgtatctctcttcctctcttcatctctcttctgcaacatcttaaagcatattttggtaaatttgctttttatagttattgattttcagaaatatttctttgagaagctaaaaatgcaaaggttttatttcaccttgtttcaaatatagtaattatctaggaataagaattgtccattttctacctattgagaatcaaaacattcacagaacataaacctacttgtttcaaatatggtagttatctaggaataaggattgtccattttctacatattgagaaaaaaacattcaaagaacataagcctaaaacctctctttcttttgtttctaacctacgggaagcctgtcacttttctaaaagttatgatcaggctgagcttcactcccccttcctgggctctctggtagaatatgccctcccaagtcctccctagtgtgagtccgcccctgtccccacccatcccctctatccaccaccgcccccgctctcaggctgccctgcagttgtttcttaatgcagcagaaggctgcaacaaccacaaactacattgcccatgatcaacccatgcccatgtccttctgcaccccccagtcagactacccactcccacaacaaccaatatcagtgttcccatatttcatgcattatctatccttctctcaaataaagcagatctagcacattttaattatcctttgtgacagtctctagtattttccttgtttttttttttttgtctagaatttactttcatcttctgattcacaggaaatttgttccatattgtttttttacaagcaatatctagttgaattacccaccatgttttacttttttcctcaccattagttcattcacctaataaattcttattgcatgccttgtgttttcctgctattgtacatgcctggaaatataggagtcaaccaaatcgtctctgagctcatgtagttgacaatctagttagagaacagagatgataaacaagtaaatatatatcaaaaataattgccatggagaaaaattaagtagtataaggattattatttatctaggttgtcaggcaagagcttacagatgggtgacatttgaatgcatacttgaaagaagtctgggagaaaagtatcccaggtagagggaatagcatatactatttgggatcttcaaggaacatcaaagaggccagtttgttggagcaggatgagcaagaagaacgtagtggtaaatggaggcagagatagtgggtgagagtggggttgggaaaaaatcagataggactttcagaccactgtaaatacttggtcatttactctaagtgagataggataccatgacagtgtcctggaaaaaaaaaagggacatgttcttattttagtgagaccaatttgggtgttgggaataaggagattcaaaagcaaaagcaggtaggccattaagaaactgttataataatccagataaatgttggtgccttggttaagggagataaagatggagatggtaagaagtgatcgcattctggatgtaatttgaaggcatgtctgagaggattagttgatggagtgttacttatggggtatcagtgaaagaatagaggaaaggcctgagaatctggaaagatgaaggtgatatttactgaaatggcctacactcttgaatgaatagattaggaagtaaaattgaaagtctggttatgggttttataagtttgagacgcctataaaacattcaaagaaattattaaatagtgaactggatatatgagcctgtagttcaagaaagaggtctggattaaagttatgatttggacaacatcatcatatatgtggcattagtgtcatgattccaaatgagataatccagggaataactatagagaaaagaggagaggaggataatttctggtgatatttcaatgctaagtggttgggaaaatgaagagaacacagtgaagttgaccaggatgaagtacttactgaggtggaagaatcaatggagaagggtgttcaagatacaaaattaagacagtgtgtcagagaagtggggagtgatccattgtggcaagtgttattcattggttaaataagatgattaagaatttgccacaatgtggaagtcattggtgactagagcaaaagctattccattgatgtagtggagattaaagcctgatttcaataagtttaagaaattgggcaaggaggaattaaagaaaggagaataagacaatttcttcaagaagttttgatttagaggggagcagagaaatgggtcagtaacttcatgagcagtaactgaaataggagaaattatcctttttctaaaaggagataattttagtgcacacttaaggtgattcttatcttcctgcaaaaatagctcctttaggtatttttcaaaattttatacatgtatatttctattccaatcatttttggggtacaagtgatttttggttacaaggttgaattgtatggtggtagtgaagtctgagattttagttcatccatcacccaagtaatgtacattgcacccaatatacacctttttttatccctcagccacccctaccccctcctcagtctccagtgtccattatatcactctgtatgcctttgcatacccatagcttacctcccacttacaagcaagaacttcatggtatttggttttccattcctgagttacttcttttagaatagtggcctccagctccatccaagttgctgcaaaagacattatttccttcttttttatggctgagtagtattccatggtgtgtatatatcacattttatttatccactcattgtttgatgggcatttaagttgtttctacatctttgcaattgtgagctgtgctgtgataaacatacatgagcaggtatctttttgatataatgacttattttcctttaggtcgattcccagtagtgagattgctggattgaatggtagatctacttttagttctttgaggaatttccatattgttttccatggaggttgtactaattgacatcactaccagcagtgtataagtaatcctttttcactacctctacaccagcatttattgtttgtttttgggatttttttgtttttgtctttttataatggccattctggctaggaaaaggtggcatatcattatggttttaatttgcatttccctcctttaggtattatttaatgagagtcttttggtggtaaagtatcttagttttcatgtgtgctcacacacacatacacagagtctttagtgacaggctagttgggtatcaaattctgaattgatgtttttttctctaatacttttaaagtttatttgtgttctggcatctgttgttactaaataaaaatcttccaccagtccatttgagttcattagcaggtaatctgcctcttattttaagcacttttaaagatttttctgtatcttgatgccatatgatagatctaccttttattatactttactcagtaattactgtgggcttttaatctgcaaactcaatcaattattcgattttataaaattatcagtaataaccttttctataactgattatttgcagttgaattaaatcctctctttctggaattccaatcatatgtgtgttggagcttctcaatctgccctccaaggctcgtaactgctcttttaaatttttcagtactactctcaattttttttttaaaaaaacaacctaatattgcagtgtttggcacagaagaagttcaaagtacaactttgcactgccacgttgaccagctattctggcactggttattctttaaagttatttttaaggttaacgtaccttatcaggcagcaggtctcaaaacctagggaagcttaaaagcctaaaggcagcctggcaaaaatcaagctgattaaaatgctctttcccattttcttgtcctcctatgccctcatccctaaagaatagtgagagggccttccttaaaaagatatgtataaaatagcagaaagaaaaaggggatccagcaagcgtgagaagacatacttagataattcacagtaaatgttccaaataatattcagcctcactaattctcaaataaatgtaaaacaatggcagatcatttttatccattaaattagtgaaaataggaggaaaagaacattttgctgacaattgttaacagtgaaactgaaattctcttcttgtctagtttgaatctaaattaggacagtttgaaagcaattgggtgatatctatgaaaaatctcataaacattctacccttccatgtagcaacattgcttctgtgaatcaaccattaggcaaataaatggaaataacaaaccaaatttccccccacctcccaagagatgtttattgtaacattactgataatattgaaaaactagaagcgatctatatcagtgatccacccttgttttgactgtcactcaccgtaagaaaatattaggtatacaaagtaacccaacagacacacccatgcatcaaaaagttccatataaggaaaccgttcaatccattccatttatttaaacaagccaatgaacaaagctggctttgatccactaaattgatcctacaacctaagagtaggttatgactcagtttgaaaagcaccaatctgaatgtcctataaaagatatatgatggaatatgaattaaatttgatattcacaattttttacttttttttgtttgagggtagttggaggggtactatgtttcttcagccagcaaggaagataatgtttctagataactccatataatggagatttactgtaatgataccagatctgttctactatgcccagccattcttatgtatctgtctctcaatgcatcatgggtcctttatggattcttttgtgatgtcctcaagcttcctgtccactccctagcaacttgcccaaactgatagaaccggcctgaatcagtcaacatctgatttcaagcattttctcttggtcagcctttggtattaggactttattctcaatctaatcaattaatattagctgagctaggttgatttcatttgaatcaacaaagaattgctaaaagctgcatttcctagaaaatgtggcaatataattggcaggtacttgagagtctttaatgttaaatggaaaaaaaataaaaaataataagagacaactttttatacggagcatgttttcggttttctttagatattttgttagagacaaaaaaggaatccagaatttattttatactacattagtacttaacagatttctacataagcaagtattatgcatttgtaatcagaaaaaaatatcaaaattagctctgtggaaaatgatcatcttgcaagcaagcatcatgtacccctacttttgatttagctcatcttcttgatgtaaatatgaagtgtctgcgcttgaaattctgtttgaagtggaaatcttcatgtttgtcttacaaataccatctcagagtacattgctcagtataaaacttgttttggggggttgggtacaaaaacctgcaaagatatagtccaggctccttttcccaaagtccttcactttcctactcttagtataaccattattttgtaaaatttaataaggcccctaataacttggggtttgggaatttgatttgaggtaacatgcctcagagtatcacctattttttattaaaccaacaaatttctatctgacaaagatgtgcatttatgtgggccttaataattcccccaaataaaactattcgtaagttctaacagttccaaatacttttggtttcagcacactaataggatttatagctgtcttagataaggagcagtatcttctaaagctcatgaaaaagccatatcagaatgccatgtgttcaggtatatttccttttctttatggtatcaagaataaaatctcagcttatgttttcactcaagtgttgtgtgattactttttcccattactctttcgattgagcctgaaaaatgaggtgaaaaaatctttctctttcaaggatgaactagaaggatctaggctggctggtcaccaaaccactgactagttggccctttgtctttttataacccctcattgtctgggatccaacatcatagtgagtctcagacatgttccacaagtctagatagccctcatccatgtgttcagtggtccagcccatcagcatccaagccagcagggtgaggaggggaagtgtaggggatgctcattgccctgaaggatgcatatgccacttccattcaggtcctgcttgccagaacatagtcatgtgaccacagttagctgcaaggttggctgagaaatgcctttcactgggttctattactaactgaaaatgggaagagtgaaagttggggataactagtaaatattagttagtccaagtcatggattgtggtattaattccatgtgctaggaaggtcatttaaatgttttatgcagaaggatgccatgatgataattatgtttcaaagcatatttgtgtgtgagagagagagactgaaagagaaagtgagataaatggattggagagaatttgtctgagtgttaagaggccattctcaaacccaagtgggaaatggtggctagtaacagtagtgaggataaagggggatggaatggactcaaaagatacagaagagataacatcaaaagatgaaacaggggcagaggaggaagaaaagacatccagataactcctaggtttctgatttatactgcaaattctggggatcaggtgtttatggaccactgagtttagttttagaaacgtgatttagaggtatttgtcagataggtggtttctacacattcaaaataagatttcaaaacatattagccacaattcacaatcagcaaaattctcaaatctagtcattgtcaactaaactattaaaatgaattttcccctctaagtgtttctcatcttaaagggtttgtatgtattacatgtcacagtatggtttattgcatataaacatgggaaagcaagccaggcagaaggagtcttgtaaccagctaaaggcccagctaattcttgaagcagtcataaatcatgaacggtcttcttgtgttaatagtgtggacaggactgttggtcacacacaggaaaatgagtcacacagtcttgtgtgtacagcaactcactccacactcaatgatgggaatggtcatgattgttctaactgtgtgagcagctacaagaattatggcaaagctccagagctagaaagctggttttttttttatgtcacccgagtatgtaattcactaaatgtttagtattttataccttttagttgacttgtgagccctttctaaaggagatctatttccctctactagaaggtaatcagaaaaaccctaaactacgttttctaaatgctgtgttcttctgcccaattgaccaaaatatacttagttgattaggactttgaagggatgagatgaggggactaaattaagatgcaggaatttcagttttctaggggttttctgtaaactactttatactgctgacaaatggttaaatgtttccaatgaaactaagtatgctaggatttctaatgagcaatgaaattttagaattcatttactcattaatttcttcatttacaagatgtacaatgtgctatcttctgggcatttggggtactttaatgaggtagcagtgagtaccacaaatggtcacttctgcctttgttcttatactccttagagaagggaaaggaccagattcagataccctatcactgctttctacccatccagatcagagcctttgctgagttctaacgcttagccctcttctcagctgatttggctgcctccattgtaataggcctcatgagactccagcctaggcctggccttcagttcagcaggcagagcccagagatgtactgggcaaaggtcaggggatttattatatgagacaatggtctgatgtgatttaatttactcctctggtaccagatatgtgtgtgtgtgcatgagagagagagattgagaatgactgatttgggagggattttgtgaaggtttatatatcaaagcagaaagaccaagaatttagagattaatacatgccaagtggtaaccaagaaacttctgtgggatcccacctccaacccctccctctctgtcagattttaaccaaatcagtgtgatgtgatctgcttgcatatatgagtgaaagaaaaaggaaatttaaaaagttcttgatataaagcctggaggaaacaatacgaaaatccagcctctatttcagcaatatctgccggactattggttagtattcccttactgttacttattgtttgattaaaaggctgatagtcagggttttttttttcttacttttgcattttttagatataaatctttaatatatggctgtggccagatgttttcctttctcctcccacttcgttcttccctcttctgggttaatttctcattgttctctcttccccttacttctctgcccttttcctttctactctaagcgaaacttctttttttctgtgctggagtttataaagtattcttttaggcaaagaaagcctttggctgccttcctccttgtctggtcaccatcaagatataattttggttttcaaaggttgttctctgaaggaaggactagttttctgagcatttagagagcagatacattttgagaaagtcaacagagatagtaatttgcactcaggaaatacttaagggttttaattctgttccatgtgttacatttcaacagtttacattaagaaaagtattgtaaagagaagtgataccacaattgcatgtttattttgcatctttagtctgagagatggtcagtactttgaaggaaagagaaatagggctttgtctccttctgcttcttgctatacctcttttcagattaactctgatgctttgggtttcttactgcatgcctgattaaaacccatcccataatgcctgatgtgatgggaaccaccacttattctatctcaatggaaagtattcacatgagctttcaacagaaggacattctcccacctcttccaaacacctctttgaaaaccgtgtccatgggcctttattcatgtcttcaacaatttgtttaaaactggttgtgctaggtagtgggcaatataaagatgagccacaggagagagatgacaatatcactgattccttatagtgctgtaataagggtttattaaggctgtgatagaagtagagaggagaggcacctgacttcacttgggagtggggttgttgctaaggtgtttctaagttgaaatgtccttgagctgaggtttaggggaatgagtagcaaagatggattaagtgagaagagtataggaggcagcagggccagaggtgtgaatagcccagaaccttctgagaagattcctttgtggacggaagaaaggggaggtttgtggaaatggtggaagataaggtaggaagaggccacatcagatcacacatggctggatgtacctctctaaaagtactggggggtttgaaacagaggctataaattggcagtttaagaaaatcactgtggtgtcagtgtgaagaatacatttttgcaagattctaacgaggattattttcagaaatttaggcccaatttagtccagatgtcagggctagtttggagtaaatttctttctttaattactccagggctcttgtattgcttcaaagaaagtagaaagtggaactcaccctcattcagggagggtgggcaagcgaccagccagctggggaaggccaaagagccaggtcaccttgtgcccgcacttgttatgatttgtttgtattgtctgcctgatgatcaatgatattagctatgacagcacgtatgagcctggggtaagtgtgtcttcttgctacttgaagtgcttcttgaaaatagtggcaggctgaagacaacaaggaatactgaaaaagcccattggactggggacaggagacctggtgctgctcccagcttggccggcaccagctccgggggcttagacacattacttcacctctctgggcttaacttaccccatttgtaaaatgcaacctttagactaacactgttctcggggccatgttcagcctctggcttctgtcattgtgatcctgcctccccaaggttcccctgggccccatcactactaaccctaggcttctagacattctgattcatagagaaataggaaagcccatttatcttaagttaatgtcagccagaagtacagttgtgtcttaaggaatctaatctagtgaacatggaaaataattttctaaggaaaaaaattgtgattggtgttctgtcctgaactgatggcaaaagggaagcagaaccacttcacacatctcaatctctctgttttttcctttttatcctcttgaatttttctgcctgtttgtctttcaaaagtagagaggagtttgaatggggatgctgaggagactgagggtagccaccgatgggggaagctggactgtgggaagccgagttctgccacctgacaaaggggcacgtgtttagtgtttatttggcatagcagctgttcaggtggagcccaggcagaattttgatgtcgttgggaccttccatacctttctgaaattctcttgcaccaacacccggcaccctcaggttatgttctgctgcccaaagcctgaggctcaacttctagccctctcttttctcttttaccggaactaacttctaaaaatccagaaatgacaagtagatggtggtctggatgttcctgaggtggaaagagaacctctagtgcctctggctgacattatatccactgacagatcccctcccgcacgcatacatgtcacatgtttctgctcatttatcaaatacagcccatgctttggtgattgagagcagagtggggattataagttgatgcagtaggcctgtgtcttgcccttagaagtttacaaacagcaacacaggcaccaagagctcatctgttacacccacagggatttatcatcttgtgacttggatattgtggaatgttttatagtaaaggttaaaaaaaaacaatgtaggcacagaggagttaacagctaagttgcggtggggagtctggaaggcttcatggacgtggtgatatttgaacgtgactttgaagggtaggtagagtcctgatttgtctaacagtagccttgaaagtaaaggaaacttgaccatgaagaaggctgttgaaagtctggagaaaagagaaggtaggagactaagactctaggagaaggtactacgttccagggagaatgcagaggtagaatcctccctcatggtgacaagttaaatgtgagaagggatggagtaaccaactgggtgaaccctgatctcattaagcaaaataagaaatagaagaaatgaatctgcatgctcataatgtagggatcagaagcaggtaggaaatgctgactttattttagacagaggttattttaggtacctgtggacatccaggtgtattatttccctatgtctgaagcacatgtcctttggttctttagcattttgatgatgatgctccatgtaaactgccccctaggattttctataagttttcttcctcatttgagagtaaagttttaactggtaacatgatcacaagtggttgaaaagttaaaatgttattcatatagctttccaatgaggggagcatgaatggtttggtactgttttacaagatgtgaaaactgatttcacttaagtagactgtaacataaagtttatgtgtctgtccctttggcttcctggtaggtggacagtctctctgaatcaatagtggctcaggcttctgatttcaaacctctttggccagccaactggtttaggagaaacatggccaggtcattgaattataatttcctgagttatgttgtggtggtcccgtaggacagtaaacataagcctcctgggaactgaacttttaattcaggaggactgaaaacaagctcttctgagccaagatttgcaaggacatgttacaaagatagactggccttcctgcttccacaccattttttcctccataaatacatgctccttttccgtatttttcttctaccctagtctgttgtagattttgaccttggctgttactttcctaccaacacattgcctatttttaagtttcctggtttgacctgatgttaagatggaaagcaaagctagcaaactgatggagatagggccttccagcctttctaactttccctgggatcatcttatgttgatttacatgttcaaaaaatttttaaaaataaataaattgtatcagttgatccagaagtgattagactctaggggcctgatttatcttagccaaacttaagagatgagccaatacaccaaaatgccaatatatttgtttgttctctatggcactgtcaagcaatttcatttcatctgattactgtgttcattttcctgaaagatagtgaacccagaaaacaagaatcagaaggtcatttgacaactgtggagttggaatagagggaactgaatgaccctctattgggtcatgagggagagcatcatcaagctttgagaaattattgcacctgtctctgtgttgggacatttttttggtcccaggtagttggaagagacaaagctgtaaattatttactagtttttcaacatttccttatcacttatcgttaactgatggaactaagttttctctaaagtcccttatgaataaaattgctagacattgcaaaaatgcccctctcaatattgacatgcttcagtggtgattatcttcctgattaatgtttacagtcaatctcaagctctataatggactcttaaaggctgtagtagttttctattgcttccataacatattaccacaaacttagtggcttaaacaatacccatttattgtcccacagttccatatgtgagaagtctgggcacaccatggcccaactgggctcttgcttagagtttgcaaggcagaaatcagtgttgttagggcctctagggatgaattttcctccaagctcattccagttgttttcatgaactgagttccttgtcattgttggaccatgttccccatttccttgctggctgtcagctgggagccagtttttgctcctagaggctatctgcattgcatctcatggtttctgtgtgcccccttccagcaacaagattctatgtacccccttccagcaacaatattctatgtaccctcttccagcaacagaagatcaagtccttttcaagtttctagtctctctgacttccccttctgccatatctcattctgcttttacaggctcaggtgattacatcggtttgtgcagataatccaagataatctccctgttttaaagccagtgggttagccatcttaattacatctgcaaaattccttcacagcagtacctagattagtgtttgaataacccaggatggtaatcttgcgggggatcttttagcattccatctacccagtctcatcagcaacactttgaaatattgtcgttgagtgatcatttctgtggccggctgatttcatctatacaagtgtattctttttatttgccattttataggataatattttctgatcttaattccatatttcagtattaaaattacttgacatagatccataaatcatcatctgttgcaaaaaagcacattaattgattggttgaatggggagattgagatatttcttttctcttcttctgctcaggtgggggcaacttttgggggcagatgagttctgttgccacaaaagttatatagcacatttggtttgcactgaatcagcgattctcaatcctggccatgctttagaattatacaagaaaaatcttcaagtatcaatactcagtccctatcctactgatccaattcatctatgataaagccagagcattgatttttaagttctgcaagtgattctaatatacagccaaggctaagaactactgatatgttccaaacactctattttggagataaagaagttgaggctgaggatgagaacttagtcacataaagttccataactagtaacagacagaagttctgtcctacaaaaaaaaaaaaatttgatgctttaattgtatgtagagttcagtgctcagtaattatgtacaaagtgagtgttgagacgatctggaacaccctacttcttgctttagtaggaagactatttctttctactactttaaaaaattatcagatcttgcaaaataactgtatgaaggtctcttctcagcagctttggcctgccttgtgagtaataataaacacagatctattctacactaactagggagctggccgcttggacttctactacctctctgtgttccagagcttcatggtacaatgcagtagccactagccacatgtagctattaaacacttgaaatggaactagtttcaactgagatgtatgtgagtgtaaaaggcatactagaatcaaagatccagtatgagaaaaaaggtgcaaaatatctcattaatacttacattgattacatgatgaaataatatttgaatatattgagttaaataagatacattattaaaattaatatatcaatttttaacttttttaatgcagttgctagagaatttacaactatgtatgtggttggcatttgtggctcacattatatttctgttagcacttttctagggagtattttctattaaagctattaacaatgaatggtccaagtccaagctattacacctcctttgatcctgaagagtgaaggggtacactgtaaacttcctggagatgagacatgatattgatctgccctgtgtttgccatctatctggcagccagtcagtctggccaaatagacttctatttttacatagaagcttaaaggaggcaggataatgccccatgtcatggagagagcacactgcatagctcttgagtaatgtacccaaaagtagaccaggtgctattggaggttctaaggcatagcgataaatattacatcccttgagcaatgtaatacagcccttgaagaaactgccatgtcagcacttatgaattatcactgtctttgacaggccctatgcactgaaaatattatggtgtctacctctctttataattcacatccaaatattactctgtctttttcttgctccctgtagtttgttctgattcactgctaccctgattgtgtgtttagtttgcctagttcacaattgaagaagcatgggaaagtaaaggcaggccttggaaagatcaagcacagttcgaaaccctacccagaattattctgtctgtgtgagcttgggagatttacttaacctctctgagctcctctaaacttccattttctcatttgtgaaatgagcctttctcttgcaaggtctgtctgagggttgaatgaaataagaaggtacctggcacacttattttttgggtagatgttgtagtgaacatctactctgtggcaagcctatggctaattgttaggatgtaatcgtgagtgagacacagctactgcttccagctaagagaagagaaagacaaggagcctggtaacgtcgggacatgaatagccgtcaatgaaaggcagctattattacactgcacagtgcaggatttggcttataacaaaattttagaagggtgttcaggtgagggaattgagacccatagtgattaaatgactacctgagtcaccagctcggacaatgctgggctgatgtcaggttacgggattgctgactcctcctctagtaatgcctttcctgggagatcacattgcctcactcttggtttcccaacttgtttaccttcaaagaataactttaccatgttggactcgataaaaggaaagaggggtttcctccaatttttgctccatttgttattagggcatgctagtaactaactgtctttgaaaacctacgcttctgttaactccaaagaaggcaggaatacatgcacttctttaagatataaaaagtatttagtatactataaattattatagtaatcattgttagattatatctcaccaagataatgaatgtttttgtttgaagacttcactgtatgagaaattgtctcctataccttatttatctccttttagattaggtaaaacaaaattttcaaatttgagtctgaagaaaattccaacatctttaaatttgtttaaggaacattttccatgatctatatgatctatcatagtaatttaaaaaatcagattttagaatgagccacgtgtagaaagagaaaaaaagtagaaagtcaataagaggtttcatttttcaaattttgttttggaaaaaactacttggtagggacaatggtgtaaagtaagatataagaaggaatatactgttcaaataagcggccatgcaattgattttctctttcatgtaacaatcacatctgcattgtgaatccgttagtgcaccaagtgaatcaagcttagtgagttgacaaacatccacagggatagttgcggggaggcattataaagtgcaatgtggtcctagtgaaacagaatgcttcgttctttgagaaagttccactctgaatagaataacggtgcataccaatatcggagtatggccaagcatttggctactgacatgccccttcttctttcactcctccataaaggaagagacagagactcaggttcttgtaactcagttgccttttttgagttctcccaagaaaagttctaacttcaagccaagcgtcttgtcactgggatttctgtatctaatttttagttctagaaatccatgatttcacaaaacaaattatccaaacctaacgacaaccacatagaactttcttaaagtagacgagggaggaattagcccctaaagtatttcctgcacaattggaactcactatagaagatgtacaattgcctgtacacccaagcacaaataggctgtattattgccttatcctaggagatatacactttacattatgatggtccttccctttcctggaccttcatatgatgtaagtgcttgatttaggaatagggtcttacatattgtggctggcgaagagcacatttgctgattgctctaccacatgcctagatgtcctcttcatgatatataaatgagggtccctactctcaatataccccataggaacataataaaacataaatagtctatttgttactactaccaagaagacttcagtaagtgtaataactaacccttttggatacatgcagagggaatgccaaatgctttaaataaattatctcatctaatcctgatttttttattaaaaagggaaaatcttatcatatgaatattagagatgagtaaactgaggtttggtagagctgggatttgaacctagccctctgtgactccaaagcacattcacttaaccccaagcccaccctctctgtaaatgaagattaatgatagcatctgtggtagaagctaatgtctcctgacctgggaaaatatctttcaatgattattaactaaatgtgatcagctgccagtggatcagatgtcatcaaataaaatcgagtgtccagggtttactcaacagtactgtctcttacattttttatcaatgttagtagattgcttaatctttgtacctgttacctcacatgaagcctagatagcatcagtcccttccccagccagtttgtgctgggttcagcttctggcttgtgaatccagtcagtgaattaatgttggtagcttaaaaacagccctgagagaggtatttacatcacagaaattggcaaatgatacaaatcatgaccctttttttaaattccagggagacaggtgttaaacatttaccagtacaccactgtctatgattcaaatcgggacataataattgtatttctgaaggtaaacaaatgcacactgagtacccttggaaaaaagcaaccttccacagatacaatcacacctaagtcacctaagtctttagtgaattttttgtccccatcattctgcatttgggaggaccttttacaacataaccataatgattttatatgtcatttgaaattttaaaaaattactttatttgttcatttttgttatgaaagcaaatatgcccatagtaagcatttaatgtttttgaatgtaagtgcagacatataaaccataaaatgtatatacgaatgctaccagtagaaataaaatgcaagccacatatgtaatttaaaattttcaactatagtcatgcaccacgtaatgacttttcaatgatggactggtcccataaaattataaaatcatgtttttatgacatcttttctatgtttagatatgtctagatacataaatacttaatattgtggtaaaattgcttatactattcaatagagcagtaacctgctgcacaggtctgtagcccagagcaataggctatcccatatagcctaggtgtgtagtaggctataccatctaggtttgtgtaaatacactctgtggtgttcacagaaccatggaattgcctaatgatgcatttttcagaatgtattcctgtcattaagtgatgcatgactgtaatcacatttaaaaaataagaaatatttgttttaataatggattttatttaattcagcagttaaaaatatgatttcaacttgtagtcaacgtgaacattatcaagatattttgcatcttttcttcttgtactaagctttcaattctgtgtatattttatacttatagcacatatgaatttagatgctaaattttaatcataaatacttgatctgcatttacatttcataaaatgtaaagcttaaaaagtgggttcatatatccaatctgttatagacttacatatttaattaaattaaatttaaattgtcattgaattcctcaattgcattagccacattttaagtgctcaatagccacatgtgacttattgtaacataattggtcattgcaggtacataccatatatccttattttataaaattggaaacctaggctggatgtggtggcttatggctataatcccagcactttgggaggccgagacggaaggatcaggtgaggccaggaattagagaccagcctgggcaacacaccaagaccttgtgtataaaataaacaaataaataaaaatagctaggtgtgttggcacatgcctatggtacaagctatttgggaggctgacgaaggaggatcccttgagccaaagagttggagactgcagtgagctatgattatgccactgcactcccaacctgggtggcagagtgagacccatgtctcttcaaaaagtaaaaatacaaataatataacaaataaataaataaaattggaggcctactatatatacaactcccaaaagtcttttcccccctcacacgttacacatttaaaattcccatcctgcattccctgctggatctccaagaggagagaaatctcagcaaaagtagttatatcaaaactgtctgtgagctttttcttcctcactcataggaaggaaataaattcacataaggcattttggatctgaccattttccaaattatcatcaccataaaaagttggtaacaacatgaactctgaaagcaagctgtttcaatgcatgcctggtgctaatgaaaaccagcagttttaaatgcccttttgggttagcttcttcctttttctgtgctgtattattagaaaagcttcaccaaggagatcaactagatataatttcacaatatttcttagtaatcaatgttggcatttactcttcccatatattaatttattaacatcatgcttctaaggatgctttaatcacttttttaaaaaaaatacttgatacaaattagagggtgttagttattttaggtggtgatttgttttgtttctgcaaaattacaaaccagatatgagcatattattccctgtgtggcttaataaactgttttttcttttttgagacagagtctcgctctgttgccaggctggagtgcaagggcataatctcggctcactgcaacctccgcctcctgggttcaagcgattctcctgcctcagtctcccgatcagctgggactacaggtgtgcgccaccacacccagctaatttttgtatttttggtagagacggggtttcaccatgttggccaggatggtctcaatctcttgaccttgtgatccacctgcctcggcctcccaaaatgctgggattacaggtgtaagccaccacgcctggccaatacacttttaatataatttttgataaaggtgttatggagacttgtcaccaaatagtctagtcttcacattaaattcacatgatactcctcatctctatttagctctctctcacctccagtaatgacctcccttgtctctcagtctttggtctcttaccttcagcttcccactagccgtttctcacatttccaaaagtcttgtaattgccttaaaacaccaagtatccaaagcagtcctatgaccttctcctcctgctaaccaactcagatccccaaatcctgatttctttcactagcactatctctcatccacacatactcagttatttgtgatagacatgtctctatcatctctcatatccaatcatcaccaaatcttatcaatacttctcagtgatattaagttaagaagtcatgaagggcggctgtaccctaaggaaaacccacttttgcacaaatctgagtttctgatcaatctgagttcagaatgctgttttaatctggtcctacctcgccaatctaattttaggcccttttattcgtgaatttgaaccttgttctctattcaccagcttcctcagaatattgtccaaaacatactcagaattcatactcatatccagaacatttgctctgagcttttaccatacaagttcaccacagtttctctcccttttccatatccaccaaagccttatctgtcatttagttttaattttaagcccttcagtttgatagctgatttttccctagtctgaccttctattttcgggtatgctccttcttttcacagtttcatgtgtttgtactgccttattcttgaagaaccattattttgattgcttttgcattaatctccatagtgccttgctcagtgttagcaggaactagtagtttaacaaatacttgctaattctaaattaaagagcatgaaacatattgttttctttgcctggagttggttatagcatgctggaaaaagtattatatctaaccttcatcttttctcatgtgtttatgaactgttttatagccaaagaataagttagtatatcatgggcctaattatgtaatttggaggcctcctctgctgggcagtctacagatttaaaattcatgccagctgcattacgctggttttgaacttgctttttcttgagaaagatggggagcagacaaaatgcctcaggctttgagggtagaaatggtgtgagttccattatgcaagaatagaaccccattttttaatccctcctgctgaaaatcttgccatgaggctatagccaaagaatgtgtaaatatcaaaagaaatttagagagggattttccctaggaaaatattgcaagcttaaaaaacccagtgggctaaggtccaatttagtagattcctccgaacaatgccatcctctacttagattgttacagaacttcttatgacagcatttgagtagactcctgtacctctgggttaaaaggtacatgtaataagtttaggtacctgggcaaaaagggcttggcagaggggaatagagggactttcttattctcacatctagtatatcattacattgtaatgttagataacattaaagttccaaacttcatgtgtccgcactctgacgtttcctagggacattttgtctcagctagaatctaatagagaaggattccctcatctagaagcttccatatggggctctgtgaagatgatgtggacagtgtacaatccaattgaatgtcacgtctcgtggcctggctcatgtgagggcactagagagagttctccagaggagtgcagatggggctacttttggaatcattcccactgagccaacatcagtggaagagaaggggaggagttagattctaataaagcccttatcttctgctgaatccatccacatttttttatcctcctcctggcccctgcacttagttagagtcgggtccctatgcagtgttccaggcggcagtgaactgcattcacctcctgtttgggagcatggcaattttaaatacttttttctgctgtaagagtatgcaaacagatttctggttaattttgtgttgaggattcttgtttgttttttgttttgatagagcacattctatggacatatgttcagcttgtaaaggaagtgttatagttccttttttttttttttttttttttttggagatggagtcttgctctgtcaccaggctggagtgcagtggcgcgatctcgactcacttcaacctccacctccctggttcaagcgattctcctgcctcagcctcccgagtagctgggattacaggcatgcgctgccatgcccagctaatttttgtatttttagtagagacggggtttcaccatgttggccaggatggtctcaatctcctgacctcacgatctgcctgcctcggccccccaaagtgctgggattacaggcatgagccaccacgccccacctagttctttatttggaagaagtgaagttcatttgcaggcagctgctttcaaaagtttggggattggaggaaggtcatcttctattcaactgaagcaaatgccacttgtttgtggcatctgccaggcatccttgagatgtctgaagaggtgacttccaaaccagaggatgcagccttccgagaaatgcaaacctgttcacattcttgctcagatgggaagcagaaaaggctgcgtgggaattggggatttactgttatactctggcattggaatagcaggtgctactggaaacttctttacctgacactaagtgtcttgggagataacaagtaaaattaacacagcatccagttcttcagtgctttctccacttaaaaagaatcaggctgggcacggtggctcatacctgtaatcccagcactttggaaggccaaggcgggtgggtcacttgaggtcaggagtttgagacaagcctggccaacatggtgaaaccccgtctctactaaaaatacaaaaaaaattagccgggcgcggtggcgggcgcctgtagtcccagctactcgggaggctgaggcaggagaatggcgtgaacccgggaagcggagcttgcagtgagccgagattgcgccactgcagtccgcagtcccgcctgggcgacagagcgagactccgtctcaaaaaaaaaaaaaaaaaaaaaaaaaatacaaaaattagctgggcatggtggtgcacacctatagtcccagctacttggaaggctcaagcaggagaatcgcttaaacctgggaggcggaagttgcagtgagctgagatcgtgccactgcactccaggctgggcaacagagtgaaacaaaaaaagaaaagagacagaatcaaatgcaaagtaaatatttagttaccaacaggatggcatttttagcctataactttttttcagccttttaatatatttctgctggaggtttccagctttgattacatagcctgttcacctaggagtaaaggacattgggagggagagatgctcagtggttctcatttgcaaagtagacgaggatgatgaaaggccatcagctcaaggccttccaggttaggaattaaaaacatgaatgttgtaaaaaccacaactcatatttatttgaaatctcacaaagtgtgagatttatttgaaatctcacaaagtgtgagatttatttgaaatctcacaaagtgtgagatttatttgaaatctcacaatgtgtgagatttatttgaaatctcacaaagtgtgagatttatttgaaatctcacaaagtgtgagatttatttgaaatctcacaaagtgtgagatttatttgaaatctcacaaagtgtgagatttatttgaaatctcacaatgtgtgagatttatttgaaatctcacaatgtgtgagatttatttgaaatctcacaaagtgtgttcatctgcatgtttctcacgtgaaatctcacaaagtgtgttcatctgcatgtttacactcaatcctatgaacgactccatgaagtagtgtatgaaggagagttcctcatgcatgtggatttgcacatggggattcagatacaagaagacaatttagtttacatagagatgtgcttttttaaagaaatttttaagaatacaaaattatatggaacaaaaaagataggtcctctgctgtctagaaattaaagtacgtcaagaattttatccctatgtagaattacacagccattgccgggggccacatctgtaggcccatggaaaaaaacatctttgctcattatttcagcctgattagggataccatgaagggctattccattaggtcaggtttgcacagtaataaaaatgaagccagtagaggatctcgtggagctcctggtatgatgataagtctctgagtaacttgtaaatagtgcaattttatggaaatgttgcagctaagctttaaagtagttggcattagttgtcagacacagcaacagctctacaaaaggcaatacgctgagttcattttcaaccagcccaaacttgcctcagaagatccgggatgtggacaccctggtatattttttctagaaaagcttatttccttcctccagataaaggtgtatggtcactgaggtgttgtgctgacagaagtgttgatctactctctccgttagactgaagggctccaggtgtggccacactgggcttctaaatggctagcaaagccacagacgcatccctcttggtgtctgaggtgttcacattcctgggtctttcagatctgtattcctcatgaaaataaaacctctctacgacacactgtgtccttgtgggtttttagttttactagggagtttttgtttccttttgcttccctccttctttctgcttcccttctagttaaacctctttaggatggctcattagcaactcgttttgagtggtttgagctcttttgttcactgggaaacagatttatgaaatgttactattaccatgattgttatgtttttccttttatggcctgtccagctcaaggccccatgctttctgatactgctgataaggttttctatttccagatcaaattaaagcaaaccttactggccctgttactgaagctgtgcatgggggtcgtttgctgtgaggtgtttctatggctttgagccagggtatgaacatctctagtgttcatgttatttcctgagactagcactcacgggaagtagaatttattacaacctgctgtttgagttcatgaaaagtaggacaatatgagactctggggcagtgaaagacttaccaggattccttctggaactgactcgtcagctcattcatgtcttacccagtctttaaacagtatttcatgataatggtctgcttttaattgctgggctttaccttaccctttttgtgattgcaggtcctacaggtatggatctctggcagctgctgttgaccttggcactggcaggatcaagtgatgctttttctggaagtgagggtgagttctgcttttccatttccaccctcagtgttttgaaacaacactgaactgtattcgctacatccaagttttttggatgattttattaaaagatgcaagttttacatagcagcaaaaaggaaacttgacttagctttaaaatcagaaactagtaggacttttctgtggatgtttaggaggaatgcagtagtcagtcaactttggcatctgatgttttcatatcaaaaattaatactacaaatcatgctgaggacatttatgttgaagacaagccaggtctcttgttctcaggctttgggagagatattgaaattacactgaagggttattagcttactgttcactcagctcatctgtgactaaggatatctaatctatttccagagctcagaattcaggcttgttaatcatattctcagagaaaagaaattgcaggtttcaaatgaatttcacttctcactctctgggtgattaccatttggctaagttgaggaaagagacacctgaaatagttgaatgatatacccagaaattatgagcttccttccccatctctataattctccctcccttttttatatccctctccttgtagagaagtctcaatatgtttaaactatgtttcatagcagacctaactaaaacaaggaagagtaatagaagggaaagggaagaggaacttttctgtcagaaagaaaactgtgctctctaacgggtgggagacttttttttttttaatgagtacttgatgtttttccttgcctgggcttctacagaagaaagaaagaatatatttctcccatgctatgacactgaatttagttgttgctttaagagtgtcagactccccttctcaccattcagctcatgttggaaaacacagtttaacagcagacttagcgccttaagatgtcctccctgaccttctagccaaaaataaatccgtagtagtgagctgctgagggtgaccacagtcacttagaaaatgagaagagtaaaatatgttattttatctcttaaagcaatttaaaaatatttatagaaaagagtcataattgttggaaatattttttggtctctctggcgttataatgtcaacattatgcaagtcaaacatggagagaattgcaggctccatttcagcagcttttcccatggctggttttagaccttggttctgagccaaagaattgcagctgagatcctctgctgttccaaagtcatggtggcttaatctctcgtttcttcattaaggtgactttcactccactgggcaagatttgaggaatttaaaaaacttgtgaaatgaaaagtatggcataggaaatctttaaagaaaattaaaaatgcatccccagctgagagattagagctcaaattacattttagaactagaaagtctgcaaggagcatctgtttcagctgcttcgacattttactaaaactttgagttcctgagtgaagagaaaacatcactagttgcttttaatgtttgctttttgtttttctttttaatagttttgtttgattcatttatttgttcagggagagcagaatataagcaaatgcaatagtttatactaaacacaaatcacatatcctaccagtacttacgcataagaagtaatttaacaaagaagaacatttttgtctcttttttttttgtcttattgaactaaccaatatttctttttcctttggaatatgtgcatattccagaatcctttcttaaaatggtctaaggattaaggatggggcatgatgtttatgtaagaaggcatatgtaagcacgttccagtgtgtgtgtgcatgcttggctctgtgtgtgtgtgtgtgtgtgtgtgtgtgtgtgtgtgtgtgtgtgtgttctagttctggccacttatctaatgaatgggttcatgggttcagccaaagttactgcataacatgacatgggtcagtctcagataatatttatggaccatgtgtttgtttttctgccaggtctggattgtagccaaatcattttatttttattgtgtctcctattgaataaggcagactaaaaatatagattaaatttttaaaaagaaaagatactactattgaattcagtttgttcagtgaaagatgtggcattgatgggtaagtgatcttggaagcatcacctggagaaaagtcacccaggagctggtagaagatgacagacctgtatgcgtagggaagggtagcacttgagcagggattttcttgcttgggcagatgagcaattagaaatatactggccctgaaaggatttttttttattaaatctaattgccctgtgggaaatttaatgagaactaaatttgaacagtgccgttattgtgttagctaaagtgttgtaatagatgttttctgtctctcatccttaatatgaagttctcatccttaatatgaagctctatatctgctcctcaaagccagttacatagtctagaggagaattttttattccaaaatcaggaatgatccacaatgccttgttttcaaagggcttcacatggttgacctatcaactgattgtatcaaaattgctgctgctggaataatgttgctaatgagaaatgtgcataaagatctaatggatataagtattcttccaaggagtgcctgttataaattaggtcgtatatctctactatttcaatcagtctacccttgaatataccctttgacctcagtaacctaaggtggaagtaagcaagcccctgccttgtagttcagtctagctgggacatgaggaatgtcttgaaattaatgagagcctgtatacctttaaagtctagattgtgtgatgaagagaaatggtcaagatgccctgaaaaagaatagatcaaggtggactagaatagttaattcaacaaattcagtgtactgataattcttaagagcttcctattttcaaagcctgcacctatggctatgaggaatacattgattcttccctcaaggaacttttcatgggttaataaatcaggcatgtacaccaagaattacaatatcaggcattgtatattaactatcaaaatggcttgaatcacactttatagaagtgatgatgacgtgagggatacctcagctgtggtgaattacagcttcatgaaggaggttgacattgtttctctagagactagaatgtcaggtttaagattttaaaaggctgagaagaacagaaggctattacaggaataacttatgtgataaagcaacaacataaacagaagtgtacagatgtagatatgagatgtctatggacaacaattcattcacttactgtgctagtcaatggatggttctattttatgcatttaacattcaacaagcatttcttgagcacttacttcgtggaaggcataggattaatttggccagggtgtgtggtacataggtgctatatttgtaattattccctttggaagcaaacttaggtcagtaggtttgagtcaaattatagaaggcccagagatagcaaaggcattatggaaaaggcaagacttgctgggcccttgaaaaatcggtagcatttggagaggaagaaaagaaagaggaagtgtatgccatatccagccagtaatagtcctcaatattggaggccagacaaaagcgctacctgcatgatggaatagtgtgtgtgtgtgcatatgtgtgatattcatatgtaacatatatagtatctacatgtaatattgatatataatatttacatacaacatatttatatttgtatgtgtgtaatacatacactatatgtacacatatacatatacatgtatatatatgtacactatatgtatatagtatatgtatgtgcacaccagtgaggtgtggcttgcaggcaaagcacataattgacatcactcaaattctgcaaaaggtgttatatcattctgtaccattcaaagtaagagacttaggaatgagatgccacatcctaagggaaccaagagccccaaaataattttttctgtatattttgaacatttttcataaacctatgcacactgacaaaacacttacttgaaaggaaagacacccctgttctcattgctatcagacagcaacaatttattttttaaaataaactctattccaccacagttgaggttccacagagctctgagaggatgtcaagacatgtcagatatatttcacacaagtattagagtcatggtttcagttagtaaacagtaatgaatgcatctgttaaatgtgttcaagaatgaacacttcaaggctttccattcacagtgaaggtggggaaaaaagccacagagcttttgattgctgctgtcttcaccataatccagaggcaagaagaaatcttatggtgtgttctagtgcaatggcctgcgtccatgtacatcagcaatcctctgtccccttgtcctcctgatattgcagaatttatttgatgttggagttcagcaggtcacagcaagctggattaatctagatggtgccaatgtagataatgacacataaaaagtctttcaagaagcttttattaagtcattttacagattcaaggaggaatttcatgtatttatttatttattcattcaattttgcatgcatgcatttattcatttttttgttttagagataggaacttgctatgttgtgcaggccccaaacagttctactagcttcaaacaatccttcttcagcctgcagagtagttggcattataggtatgagccactgtgcccagcccaaggaagaattttgaatgtatattcctgcttttaaggagctcacagtctttagaagagaaaacagagaaataaacataatttaattgtgatcctcttagattattaaagggttttaatctaggtaataatactgttagatttttactttgtcagtaatactagtaataggataaaagtgaatttgaaagggatgaattagaggaggaagttgatgacaataggtcaggagagagataatctaagtgtgacagggatgataaaaaatagatggatcacaaacacggggatgttaagaagacagaattaccagtactcagagtctaattaacctgtggatttttgactcggggaactatcagtgccttcttttccatccatttctaagtttctgcatttttaattaatgtgatcatcagcaatgactcacgtttaatgcagtgaagtcctggtgcacagttcagcctattagcactaaagtggcacttgcacagaacaactctgtaggggaggaaacatgctgaggctggatgacagcagagtgtctaagctacgcttcttttgtactatttctctgaactcctcatgcctgtgtctaccctgggtcctgcagctgtctgctcagctctgcagtatggctgtggtatggctcaggctactatgcagtgagggtctacagcaaggacaaaggtctgaactccctcctcattgtagtctctggacatgtgtgactctatcccaaaaccttgacaatcccccagatattttgtcattgctagagtatgtacttactcatgggatacaataaaatatatgcaggatgagttgagaacagcagagccatgtgctgggcagagtctgggaggttggttaggctcccacggaaaatgagtgacctacccctacaaagaagctggcagtgtgagtgattagatttgtgccacagctaattagtaaattgaaggagtgggaccacccaagaatactcagaaccctgaatgttagttaaattcacacatgccagtgatagagtatatttctggtcttccgccttagatgccagctcttacgggaacagagccagtcctggttatataatagaatgtttccacaccactttggttcagtatcctaaattgtggctcttgttatggggtagacaggaatgaggttgacataacgtatttggtgtttggtgatggcaaagagtacctgttcatagacacacctggttgtccacctctggctagagaccaacccaagttcaactgtgcagaagtccatgttggcctttactggcccagccagcctctacctgagatcattccctacaacaaggggcccaggattcctcagtcaccccagcagcttttcccaaggaaaaccatctcatgaagaatttgccattgatgattttctcctcactgtgcatcgaagtcaatgggtttattactgagagttggttccttttaaaccttaaccttacactgtatatgatatagaactgtaggcaggccagggtcatcaataaagacatttttggggcctctacttggcttgtaaccacctgcttatccacagtactgtgcacctagcttgtcatcaggcagagtcaccagcagccacaacaaaagggtgcaccttcgtcttttccaagcagcaggcaatgtggctccattttaacttttctggcaatactcacatggattgttaaataatgctgtcaacagtgtcatcttcaaacccaaagcaaacttcctcatcatctgtagttagcagcatgaagacggtgatgatgtgtaacataaacacactttgaaatctgatgcaattgaccctacgaagagagtattccttagtgccctgtctggcaacttctggacagaccaggaggccttggggcttagagcacttcttcagcctcagctgcaaatccattttttcttgtcccttgttcccaggatgaagccacagtgtttcatcaggtacatttatcaggaatctctgtttctgtttatataacaatttaacttaagcctcaaccttcacagtgtacgcatcacatttccatggaaggattgcaggtattagaagatggtggatcatgtcttaaccacaggggaaatgtttcaggatgtttttatagaaactttcactaacaagcaggacacaggattggcagagaggtgggggtaggaggcaggtgaagggtggcatttgttgtgtttccctcttctaaatgaagttataatgacatctgtgtttcaagagtgtggcaagtttggactgagcttgaaataaatacagtttaattggtttcaaataactgaacaaaatgaccattccatgccctgtgtaataaaatgttatagaattaaaacttattagacgttaaaatccatgaaggatattttgctggatgcccatccttcagcattctgatgaggatcttcgtgtatttgttcaatgaataagtgaatcagcagctaaatcctgacctttgatttcctcagttctctcctgcaattgtcactgatgctctcatctccagtcctgagcaaggcaggagttgaattagtatccccttatagtgggaggggtctagaaatagctgtgccactttagaagctaggctttgtgggcttttccgggggatggaatgatttcattttcctgctttctactccacataccaccaagatcagaattctgccctaaacactaatgtgtgggagcctgatgtcctgcctaagtcttgtcaacctctttccaggtgactgaactccgaaccccatgcaccagtcactggccaacattctgcattaagtgacccggtcacccagcaccatccccctgacaccacctttatctctacaccacctgcctcctgcctgattaaatctcctcaaatattgacagacataatgatacctgaagatcccaaatccaaattttctttgcccctttggacattgaactttagattacaaaagaccctgactagggatcctgtggatagctgagtcaattttcttagccccattccttaaatatcaagtctttctaattttccaatgagagcacatgaaactctcaaggttaaaagtcaatttatattaataaaatctttaatttcttgatttctgaatatgaaaaaatgatactttgtgtattttttaattttttggcaaaaccttccaaatttgtggaaagagaaataatattgactactggataaccatgtgctatgtgtaaatattaacggattcaccttagtgggcactgacttgatgatgtttgccacattatattttccagagccttggctctcccaaaaaatgagaggtcatttttcaggggaggaccattttgtgtttggctaacatttaggacatataatttcttctcctctacatgccactgacccactgcatccctggttggagcaagaagagccatgctttccttaataatagctaatggtgaaaggatgtgttgtaacaagagcagaggaatagggaaacaggagaaagacagtcagttgaagagtcctgccctgtgtcagggcaccgtttggccagctgggcttgctaggagtagaatatagaaagtacatgaagtgccatactcagacagctctggctacgttgacaaactggtatatcatggtgcccaactttctttgttagctgggccagcatcataccctctagtatttgctctgaacttcgtaagcacggttgactagctttcttttcctctgcagttatcattcagactgaatagtttctaagaggctcttaatgagaaatagaaggaagtaagttaacttctgtgcataccttggccatatttgcttgacaaactgatgtgtatactaaagccattatgggtgtgaaaggcaaaagtataagtgctccccagtatgacctggctattttgtcttacttctatatttgattgctaaaaatatatgttcttgggtcaaaaaactcactttaagggaaaaaaatggaagaatattaataaccaaaatagaagaatattaagaactttaacatgagatgtatttagatcaaaaccatctctttttggatttttgcgggtgatttctccaacatgtttagaactgggttgctattcacccaaaggtggaaacttttgatgttggggaataccactgatgccttaaagcagagggtaaaaggaaaagactgaaattccaggctaaaatgaggagagcatggccaccactgagcccaaggtagcattcaataaatactatataaattactgatttatttctacagttggttgatagaagcttactatgatctgcctaagggtgcatcaaattcctctggtacttatcctattcttgactatcacttccttgggggcagcagttaatcaggtagaggcttatcctgtcaagagagtaaagggagctatggaggaactcgctgggaggagaagctggtcctcagagatgcttagggtttaggaccagtaagaggcagtctccacaccacccacatctgattcttgtctccttcttctctgctgtggtcaggagaaacagtttagattagggatttcagagcagtggtgttgaactttgtcaaaactgcatttgaatcccatttatgaattgtgtgatttttttaaggttgagttccccagaagtaggatgctgagacaaggattcctatgaaagtgaattattagaaaatggtccagggagaaagcgataggagagtcagaaaatgagacggggaaggtaaagaaaccagacaaggatacaatatcaagtagaatccaacagtggtgtgggtgggtagaagtatctgtctcagcagattttgagttgtccagattatcctcagttggtggttaaggttaaatttgcatcctcacgaggatgcaaatttctacacactatcagttgtccaagtgcaggtaaagctggctccagcagcctgagggcagccgacagagagacacgggtcctgggtgtgggagtgaaaccacacatgaagcctgcatgtaaaaaaaaaaaaggtaaagaggggctgggcgcgatggctcatgcctgtaatcccagcactttgggaggccaaggcgggtggatcgagaggtcaagagtttgagaccagcctggccaacatggtgaaaccctatctctactaagaatacaaaaattagctgggcagggtggcgggcacctgtagtcccagctgctcgggaggctgaggcaggggaattgcttgaacccaggaggcagaagttgcagtgagctgaggtggtgccactgcactccagcctggtcaacagagcaacactctgtctcagaaaattaaaataataaaataaaataaaataaaataaaataaaataaaataaaataaaataaaataaataaaataaaataaaataaaataaaataaaataaaataaaatagtaaagtaaaataaaataaaggcaaagagatcaatctacatcaccaaagcactgacagcatctgctacagtgactttggtagtttcttacattctctgagcctcagttttcttatctcttaagtcagaggaaaatgacttgtttaaaaaggcttcaatgaggtaacacaagtaaagcatgtattgagattactacacaggaaaagcagttgctgaatacaattagtcaactggtaattggtaataattatgtaaaattcctataattatagggagcgctatacaattattatatataattcctataattggaattaccaataggctaattgtattcagtaactactcttattgtcctcaagttgagttattattgcaagccctgagggctgaataaacatgcaaactaaactgacatgtagaattttatttataacaatatatgcctaaaagaagcggtttatttgcacaaggaaattttggaagctacagataattttaataatgactacagaaaactatcttgaagatgtttctaatgtttaagacataatagcataagcctttataaaatgggatactgttatgtagttatagttgtaagaatcagtgtttaaaggatgggtttgatgaaattgtactactctagttcctgtgcttctaataaaattaaatctgattaatacagcaagtaggtctttggtgagttgattctgatgctgggagtgattttcttaattcttgctcagaaagccatccatgagaattaaatgagatagcatgtacaatacctggtatagttactggtaagaggttttcagtagagaccaatctcctctttgtttaccttctcatcaagagaggaagaacaaggaaaattaggttgcttttttgagaaaatactttaggccaattacaattatctgaaagtagaatgaatttctaggttaggcaagactagagttaaaacgtgggtgtgcagggctgacctgccagggtactctgtatggaagtacatggaaatgtatgcccaaatacagcttcatataattgttttgatcatacacagtttccacatgagattatatttgaatgactaattcagcaaatataaaaaaggagaaaaccagtggacaagatgattcctaaggttcctttcttcctggtctatgccctagtgtattatgaattgatattcactggaacacacagttactgctggagattgagttataaaaacattcaaatgggttactccattatatctacttaggaaatttttttttaaaataactgatagatgttcagttatgcgaaacgaaaggtatttctggctacccctttatagttgtgtacatgactgcagagccatcatttcatgcttacttccccacattcatgtaccattttctcaaaggaaaattattgaatgaacttgctagttttgattctggggtttgttttaaacaactgatatttaaatccacctagtcctctttagctgttctcctaggaactttaatattaacaaacagctgaacttatacattttgtaaaagagttcagacaatgaattcattcttcttgaaatgcatggaagtacccaggtgctagctacacccaagagccttttctaaatacaaaaaggattgacaaaccaagcattcatcctgtctgcgtccaacagttcggaatcaaaccatgaacttgctgttcctctgtttgtggttagcttgtttgtatatttttaaggaagatgattcaatgcaagaagtagttttatatagtacgttaagtaaatttcctatacgatatacttaatcagaaaaatatttttgaactagagctcacagaacatatgattacaatagttttcagaaagcaaggggctaaatgaggatttctcaaccttggcactattgagattttaggttaatttatctatggtgggaggcgtgtcctgtgcattgtagcatatttatcagcagttgtgacctcgtacccactagataccagtagtcccccttctcagttgcaacaaccaaaacaactatagacattgctaagtgttctctaggggtcaaaatggctcctgcttgagaaccacagtctagatctggtagttgcatattgaactgacagtccccaggattgttgtggggatcaaattagataaaacttgtttatattttttaaaaagtaaaactaatacatatagttacattacacctcttcttttcatttgttactcatctaagattttttgagccagatgatggagacccataaataaattaaccttaagaggctcaaaggtttgccaggtaaacaaagagttagaagaaaaagagagatcatgtcagatgtgccttaatgaatgtgtgtgtaacatgtacaaaaagttatgggaaccccaagaaagaaaagactccttttgaatgaaatcagagaaaaccaactggaccatacagttgaagctctataacaggaattaccaattaactaattgtaactaaatactcttttatacaatgtcatatattcatgtagtttttaaatctagaagtagttaaggttcataattgtcatttctcagggacactactgaagtggtatcaaatctaaatgagcaacttaagaattgaagttgtcagacagctgttaattcccctttttcatacctgctccaatgatagccaacaatcaaacaaaaataataaaataaaaacgaaagcaaaaaatacaactcagatttcactacgtacagcaataaatatcagagacattagggaataataataggtcaaagcagaaattcattcctcagcatgttcttcaagtggaagaattaggtctgttttagttctgttgattctaaaagaaacattcaggctatcaagaaaacctgttttaaactctaaatctgacactatagatagatagatagatagatagatagatagatagatagatagatagatagatagatagatagatgatagatagatatagatagatagatagatagatagatagatagatagatagatagatagacagatagatagatataattctgcctaagtaattatctgctggtaccaaagagattgacaaagagattcactaacctaccagaatttcccaaccttgttccagggtattctacattaaatactcattaccaaggaaattccacataaaagctgtcatgcttgatggagccatatttacatgaaacgttgcagcattttcttctttaaacctcttctacaatttgaccaattccatgttccagggagtactcagaggctgattaggacatgagttgttagcatgtgctgcactaatggttatgagtcacatttgttttggaagatcacccttaaagcctgtcactcatgcttgtttatgggaaatacaacaacttaaacatcagttaacaaatccccatgaatgcatggtcatatttgagtgcttctaacaaatgcttcctttcatttctcccttgacagccctaagaattaaaggctggtagagcaaactgggagacatccatgaacatttattaaaggaagcataggagagtatgataactgcaaagccagctgtttatattattggtgtgagattaaatttcatcagtcttaaaacctgctttttaccactagagaaatcaatctgccatatttaaggttacattaacgtggaacattccacgtactgaactgtcacatgcctttaaaataaccatgccatgctgttttttttttttaaaatcattacacatgaaacaaacagctgacaggtggggatctattggtatattcaagtttttcatgtgaaaatttcccccaatattagtggtaatcacaatttgattatgagaaacaaacataccatatataggcagaactatatatcagtagcctttatatttgacagctcactgtaaaatccatactatgattcagtgaacatatttatgtcttatatctgggttgatctggttgccttcagctttcctcacttgaaaaaactatacttaaaaaactgtaatttaatgttaaagttaattaacacagcaaatacttattgatgacctattatttactgggtactattttcggtgcttgcaatgcctcaatgaacaaaagagataaaaacctctatggtcatgctgcttgctttagtgagatatatgtgtgtttgtggggtggaggacatgaatgtgaggcagacaataggctacaaaaataataaattatctagtattttataaggtggaaagagctatggaaaactgccccatttgttcctcatctgagtatacccaaaagttgatctttaatattttatatgagtctcctaggttctaaatgttagaaactaattaaaaataaattgaaactaaactaaatatctttgtgatctctctggctagaagcctcaggaccagtcctcactgtttactgatgaggaagccgaggcccagagaattaaacgatgtagccaagatttcaagcagttactgtcagaggtaggaccaagacacacaacctccttctctagtgtgtttttctcaatcggttggcatttaacagcaagtgttttagttgaaaaaatttatttgaaaatctgtttgaaacatgacaaaataggaaatacctgcttattccctcactgcagagtggtcctcagcagaaagaagattttgaagtttatgaattatgttcagacaagacccttataaaatcactctcctctctccagtggcagaagcgtggcccctgactcctcacccaccttcattcatctttcgtattccttgaaaattaccactgagtattttccttctgcttcctgcagcaccagcagaaaagatgaggatgcgtctcttgattgccattacaaatctctttcttatgcttgtttccattcttattctgcacataacttggacttggccatcattcttagagctcctctaaattgtttgattaaaagattgtttataagtccagagtcagaacggaattgaaaaggcactgcacattatgatggagaggaataaactccagtcaaaagtcatggcttctggactcaccaccctaaggcagcctcactggaacttgcttttccaactgtcagtggagttttagaattttcctacttgcaagcttgttgtgaggattaaacggttaagagagattgtgtctgttatggaattgtgaaaactgtaagttgcagtccacactgtagaaatcttagttacctctgccctttctttctctagagacaggttgctagtggaatagacaagtttgccattaatttgaaggttgcattaagcatatattatgttagtgaagttggtcttctgaaagttggaagggacctcagaggtcctgtattagaccaactgtggctgttccttagaataagctggaagttttctgaaaaatacaaattctgaagcctcatacatagagattctgatgtggaagatctggaattgatggcagcagcggcccatctggagccgctgctgtgaagatgccggctgtagtgggggaggtgcggctgtggttgtgccctccacagagctgccaggtgggaagcctgacccttctgagttggcaggtctgaagcccagtgctcttcaggcacagttgcagctgcccatctgtgcctctagacctgggcatccccgtgctctcgggggcccaggaagcaccccctgctcctgcaggcttggaagtgcctgctatcactccctggcctctccctgcacctgcacccagcacccgctccggggtgaagcaaagtcatggccaagcctggatgctgtcatgacctggtcaggtgtgcacacactcggagcagtgctgacacaccagccccctggcacataggcactctctggactttggacaccaaccagcatgggagggagactgagagggcactaaggggtggttcagcgcaggcctgcaggcgccccttggcatgaacagcctgggtgctgtggatgacatgtagatggtggcagaaggcagacaggctcctgggcagaaagaggccagtccccagtgaagctccaccttcaagccagggatggccggaagccttgtggctgagctatcagttccaggtggagtccttggctgggagtgagaacttatggtgctttatccaggccttcccatagccacccatggaccaataagcacacccttcctcccttctgatctcataaaatccctggacttatccaaactcgggcagatgtcgggatgacctgcctatggataagagctacccacttcaggtctcctgagaactgtactgtcactcagtaaagtatttcttcaccttgctcaccttccagttgtctgtgtatctcattcttcctggatgtgggacaagaactcaggacccacttaatagcaggactgaaagagctgtaacacgaacagggctgagacatgccttccctgcccaccacattgtaggtgacaagaacagaagagctacagccctttggggagcccagacctgtgtgacaccctctttgggggctctgcggtttctgtcatctccatgctcccaggcgtcaccacattcccctcgtccagatgcagttgcccacggtggaagccatttgcgtacatcagatgcagccgcaggcttgcatggagctggtgcctgtgctggtgcctggagctgctcaccccaccacggcagctggtgtacctggctgtacacagtggctgaaccccatgcttacccactcacgtatccctcattgctccacgcctggcttgcccttggcaggcatggggtccaggctggtagcgcaacccgagcatagcctaccaggccgttggcagaacaagcccattgggcccgagcaaaacttgggcaaatgtgccaccagccacaaaaaggaaacacaaaagtttccagctggaaaagcaagacctgaagaatcctgcaacagaatgatgctctggagtgttttctgtgttaggtgtgcttgtttgtttgactaaacctccaaacatgagtctgaagattaaccagtttgggaagccttgcttcagctttctactgacattaaactccttctcctctcccatttctgtcttcacttagaaatggaaacccactaattactcaagatcttaccttttccattcagtcaactaggcccttgcacccccattactttgcgttccaccttgacaattgctattgccaaacatcggcattaatctattttgacatcttctttccacctgctgccctctagtggaagtgctgacaagcagcaaaatatttaactgggaacagcaggaaagtgaccagtttgagctggccagttcacacaagtcagcgcaggtccccagcatgatgtctacagactacagctatgccagaaatcgttaggatggcctccagctgtttggacactatttgcacacaagttacatttagagcagaactttgtaaagaccctggcatttattcaagggctttttaaaggtttcaaaaatctacctggaaaacattacccttgggatatttttgtttctttgtccctcattttcttcttttgtcatttacccaaattcttcttcttgcaaaagaaggtggttctttcctgccttccctaacctttgaattttccaaatcttgcaaaaaataaagatatatatatctttaaataaagatatatatatatatatataaattcttacagtttagaagcttccagtcaccaggtgaaaggaattcacatgaactgaaaattgacaatgtaaaggacactgtgttctcctactgttcctccaagtctctttgcggtccgttagtagtcttcttttttccaggagacactgaagttaagagagtttaagaagattgtagtatgtcacaaagcaagtggaaaagctagcactagaactcaggtctggctgatggaaaacccttatgtattttttttaatgtgcttctttggtgtttagtgattatttagtcttccgtgaagtaataaataataacttgcatggtaaatgttattaaggctcgaggtactaaatttatagcaaaagtcattcagcttttttttaaatgaatgtttaataatcagtgtgtctctgcataatctccaattactccttttagcagaggaacatggcaggaatgcaggtaagtttgggtgggaggaaaagacagcaaaagccacagcactgatgcaaagttgagactagatttcacagggcagatgccgtatactccctcaagctttgaagaaactaaatagttatctatgttaaccaatagggcagaactcgtactccaaacaccgacataaaccgtgtgtgtgttttgtgtatgtgtgtgtcttcccccacagcattctgcacaattattaaccctttttgtgtagtggtttttcataattttatccttgattgttaatatcatggtaagtgatgtgttataaatatatttttccttaagtatcataaacaatctaagatttcatttggctgatttttcttttcttagtattgcatatcattattgctgttagaacactcatacagattattcagcttcttaactagaatgtatacacacacacacacacacacacacacacacgtgcatgtacagaactgccttctttctctttgatggtagaaaatacagctctctatagtaagcaaatttgctttcagtctcagacatacccttcattctctgcatgactggtaaagagcggaaagagtaatacttaggatctggattccagttccctgttctctgaccatttaaaaattttgttaccttggccaggtaaatacagttctatgaacgtcagttgtgcctcaattgagcaggcttgtccaaaggattcctcaaggatgaggtatcctttcagctgtatgagctgaaccttgatttgtgcaatagtttaagcccctgaatagtcagataaaaatcatgttaattaaaattaaatagctattggtaggatctggttttccactggcttgcatgaatgatgttttgccctcctttctgatactcagctcagaggattccttccattgggttttctttcttgtagtttttctggttcataaatagcctatagacaaacactaaactgttacaggtaaaaggaccctagattaagccttttataaaacaaatagtcctgtgtaaataatgacatcttattttatgtgtgtgaatttgagttttaggatgtagggcatgtctgactagatagctaaaggctgagctccaggcagccagctgctatccaatctccacacctggaatgttccaaaaaacctcctgtgttttctttctgcagctaagcactgatgagcaggatttaagaagtacagccacacactttttgctgcacgttttttaaagtttgttatttttgtcatagattacttgttttgaatcaaaaatttttaaagaaaacttaatctcccaaattttaacccccttgaagtttcaggattccaaggaatatttttattttaagatgcataaaatactcagtacatgtacaaaggtaatgcttataagaaacttagaaaaaaaaaaggagctagtaagattgagaaggggaagaatatctaagctaacattactaacctggcaactattataggtggctggatagcatgaaggcataaagctgaaggcagttaagaaaatagactggatttgaatcctggctctacctggattagttttgtgacctcagagaagttgcttcccttctctgtgcctcagtttcttcatatgtaaaaggagataactatagtgtctaacacacagaattattgtgaggattaaataagttaatacatataaagaaagtccaaaactatggcacacaaatgtttaatatatgtaagctattattgttataaaactaaagaaagagaacccagaagacattcagtttggtgggattcagatatatgttttcctttcctcctcctcctcctcctctccttctctaaccccactatgcttgcctcccaatctatccctgactcctatttttcttcctcccaacttaagaattgtcactaaaaatatttagaagaaaagaaaatgtgcatacttcagggggtgccaagcttttgggtaaagtacacttttcagctaacatgactgtatccaacagtaatgggctttatggcaagaaaaagcttttttctcaataaatgggttttaactttgtaatggattattctctttgcatgggtaattcttctggaagatggaaattggctcgatgataagataggacagttggatttagggatctagattaagggactatcatgtatgcttttaggagagaagtttaatctgcaaaacctacttgtcttatttaattaattgttgctcttagctgctcaattttgtacaggtgacttgcatgaaagcaaaatgtatgtcaaaatccaaaagcagagtgaagcctcgggacttcagtgcttttgggtgtctttccagacctctgctcttcccccaccctcaccaaggccccactgacctcaaagggcccttcttgccaggccgtgaattacgtctgagccagagggctgggactacagccaaagccaaatgaaggtgcagaatttaggactaaaaaaagcctgagcacgtggcactgggtatagcagataaatttgttggagaaatggtttataaataacatgaaaagggaaaggggatagagggtcaaaatattgagctgttgagagttgttcaatatttgaggtcagtctcaccatttttaatactgaacccaaaagtaatacacactgaaaaaaaaaaaaaactcactgaataaaattaactacagctgggcttattttttcttatcaagacatttgtaagtttggcagcaagcatttttaaacaggatctctattatatgaaataaatttaaaaacatgtgtctacagtcaggacaaacaagtgaacaaaaacaaagcaaaagcaataaagaagccccatgaaggcattatgcttttctgaggacagtataaggctaggatactgcagaaactgaaatacttagggatcttattgaaatagttttcttttcctccaaacaaagcaaccatctcagagggatagatgggctaaaagacaaggaataaagtaaacagaagattggtaacttgggaggttttcttttcccctttctctttttggttttgatttgcttttcccttgttaaagccagaaaggataaattttggtccagaactcccaagaccagagggtcagggaaagccaccccgaggctggaagctatgaacttatcgctagtctaaactccacctccttcttccctgggagtcctgcacaaatataactgcctgatctttctgtttactggcaaaggttttgctcccttctctttcgtatcggaatgtgaacttggggaaagatttggggttttttttgttttttttttgtttttttaagaaacagagacttgacttattcctcccacaaactcttaccctggcacagggagaccacaaactaagtgaaaacaaggtaagaagcttagagaaatgggaccatatgccctccccggagctgaaccgtgttccctgtccaccatcaccttgtcttcccatgctactactccactcctgtctcttccacactctgggtcacatgtctaccccttactgtgagttataatcgcccaggaagggtaacccattgactgagggccaagcttctgataagtgaatgaacttgtcttttctcctggccagatatctgtctttgccagagagggctgagtcagggagactaagattttcaaggtcaaattgtatattgtttaaaattgtgaaaatttgctttgtgcattgaatctcattttcaaaataaaattatgccttaagtcagatcatactgatgcagattctgcagatgttaagaggcttccatgattgtatttgccagctgcaggtcaggcagtggtggatggtggtaagaagtaacctatacttttggctgggagctgtggttcatgcctgtaatcccagcgctttaggaggctcaggcgggcagatcacgagatcaggagattgagaccatcctggctaacacagtgaaaccccgtctctactaaaaatacaaaaaaattagccaggcttggtggcacacgcctgtagtcccagctacttgggagactgaagcaggagaatcgcttgaacctgggaggcagaggttgctgtgagcgagatcgcgccattgcactccacactccagcctgggcagcaaaagcgaaactccatctcaaaaaaaaaaaaaaaaaaaaaaaaagtgacctatagttttgcagtagaattttgaattcaaactcaggctttatattttctccaaagtaaattgtattttgttcattttaatccattggttgactctaatgagatctttctgactggaaattctgccctttttttcctccataactgtattaccagttatctctcatccatgtgtttgataaatccatatgaatgtctttttttgttttctaccaaaacctttataacaaaacaaaattcatagctttgtcaactacacttgaaaattatgccccaggcttttcaggattctgtaattaacttattgagtcatttgtttaaccattggtgaattcatttatctttactcgggccacagtaatgtattttacttacaacatattatgagaaactacatcacctgcttcaccgaaattgaaaaacattagatgaacaacactgccctaaaccatatttcaataatcctttcatgaaaggaaaggaagtacatttcctataatgatttgttcttagtgaagccatgttgactccaagtgacctgttgtttcctttctgggctcatagaaataatctaaccattctaaaatattgatggggattcaggtcaaaggtatagttttaaaaattcaccatatttaacctgttaaacattcagtatctcctaccttctgtcttccaaaaatccaaagaaataaccatttattgttccgtttatgctttcagtgtctaggacatagctaatctgatactgaacatttgaacttatcgttagctttgaaaatatgccctattgtcctattggctttatactaaagttttattaatacattccctcaatagtctccagtctttgcccaagaagaagaaaattctgtaagagtttctttttaccttcctttcttctctgagtggaataatcttttttgttgtcttcatagtattttagagttttgtgagatcagacaaaatttacctcagcttataactttatcttttaagtggaaaaactctgaactattgattattgtgtcatcttgaaaaaatagtctatggaatatatataagtagttgtgttatttttttcagtgttaagttgacctttttcttttagtgcattgtgaatatttaaaaggtcatttgtgcaacatataagaggattgacaggtttccatgcatgatgcttaatgtggagatgatttctttccatcaagttattatgcttggaataagtaacacatcttaaaattacaaccttgatgtagcaaatcatcagatgggttaccattacatggaaagagccagtgaaataaagaccattaagttcaggtagacagagatggcggtgagaaattcacagccaaagagggccatatggaggtgaaaacactggtaaatggctctgggaccctaggagtctacagtaagtcattgggaagttggagtggagaaaggcaacattagctaggtatttcattcattcctccataaatgcttattgggagcatgttgtgtgcctggcatcatcctagcttcactgaaaagaatgaggaacatataaaatgtgaaggtgagaataagtgagaagtaattgctctttactctcaattatagctgggcaagtacatatatgaatatgcttttgtgttctgaacacacactaagcagttggtcaaagtattaagctagagacaacttctactttcaaatgtagtgtttcaaaataataataataataaagatttcaggacagtttacatataaccatttagagatttaaggattaaaatcaggagggaaggagaaatgtctctgctggggaaatttttttaaactagtgttttctactcagctactcaatgtgatttcttttattttcttccttccattgcttattggcatttattgtggggaagactgctgtgttggcagcatgagagagatgggaatcaagaaaatggaaacaccattcaatattcaaaagccactatccccttaaaagcaaccacagatcattcagttttgccacatactcagattgcacactaactggaggatgttaaaaagtgttctattacaaccagttatccagtttttgccacttaaactctgctgtgagaaatgtgactgtagagcagccttaaaaagagatcatcttgatattaagcagtgttactcatacatgcttgttgacattctaacaggtgactttgaatggatcttcaggctcagaaacatggttgtgtccctagaactggtgaggctggaacaaggtgtacagaagtgaaatgaccacttgctttctctattggatttctttatccagctgtgcaattgtttcagggactacagttgattttcctgatgcaagcctagcaacttgtttttcagttcagcacagtaaaatatgaacaggagagaactccctgttggccacccacctcacaatctttaaaagggaactctgtacagaagcattctgcattaggcaaatgtacacttctgcaatcaaaatgaaaaacacttgagctgaatcgtttttcgttagctttagtttccagccctgattaaaaagaacacagggaaccctgcaagtttaagcggttttggcagccgaggaaacagctgtgacattgtcaagggttgtctgtaggagctgtgcaggctgctgacagcactgataatgcccagaaatggggcagacgcttttcgcatttggtcatcaaaggagtggcagcagctaggttcaagaagtgaacttttgaccctgtctgagacaactggctctcgtggatcttgttctgtcattctccagtctgattttctctttcagaacaagtgggtaggatctttggtttttaaactgtttgactgttattaaaagtaagctagttcttatagctgcgattggaagggatggaaggtgaggaagaagagctggtatttcccactatcctgcaggggtggggaaatctatcaacgactgttccactaatctgcggatgagttatctagggaatatcatgcagttgccaaagttttcagcatctaaaagcctccaaagttctctctgtgagggtctacctcccctgtctccagatccttcccatgcccctcagactcagcacttgtccactgtccttgctaccagggaatccctctgcagcccccttaccctcctgcccctcccaaaagagctccagactttgacctttctcttccacctcaacatctgtttgtgtcttaaactgatgtccattgaaagaaacagataaactaattaatgctgagatatgacttatgaagtattatgaatgtgctaactctctcaggggtatgtgcattttaatagaggaccagcagtccaaaggccggtctcactccactgtgcccctctaacagcaccgagtctatttccaggcagccagagaccaggcctgagaacttgccccagaccaccagcgtccccactgagaaagcaagcagactcaacagtttttcagtgtttcagggagcctgcagcagcaatacagttccttcaaagggtctgtggattctctcagctttcctagtaggttgctgtggtagtttttggagcaaaagttcacgatgtgaatcttcacatgctgctctttgtgccgagcaggtgcttgcaagctagttctgcccctatctgccatcttaatcctaacatctcccatgtttttttaatttaacttctattttggtttcagaggtacatgtgcaggtctgttatatagataaattggatgccatgggagtttggggcatacatgatttcatcacccaggtaataaacatggtttccaataggttagtttttatgtcctcacccgcctcccatcctccacccccaagtgggtgccagtgtctattattcccttatttgtgtttatgtgtactcagtgtttagctcccacttataaatgagaacacgcagtgtttagttttctgttcctgtattagtttgctcaggataatggcttccagcactatccatgtggctgcacaggacatgagctcattttttatggctgcatagtattccatggtgtatatgtatcacattttctttatccagtctactgtcaatgggcatttaggtttatcctgtgtctttgttattgtgaatagagcctcagtgaacatacgtgtgtgtgtgtctttatggtagagcagtttatattccttggattgttgggtaaaatagcagttctattttaagttatttgagaaatcttcatcctgctttccatagtggctgaactaatttacattcctacaagcaatataaatattcctttttctctgcaaccttgccagcatctgttatttttttgagtttttaataatagccattctgactggtgtgagatggtattcattgtggttttgatttgcatttctctagtgaatagtgatcgtgagtattttttcatatgcttattttccatgtgtatgacttcttttgaaaagtatctgttcagggacatcattcctatgaaaatgctagttaattatacaagtattacttgtttccaataatcgattttttaaaaaaccttataatcaatattgcattaaaattttcagctgtgtgattccttatcattttcttggatgcaaatgccttgtgtcacgtactatatctcataaatctatattgcatctaacaaagtgctttgtgtaaagtaggcaattaataaatgcttgtttaatgagtagatttgtttttgttttattttgctttctatgttttcctaaggatgtggggcattaggccaatggaaactgtctctcaaaagttcttatatataaatattgatgtcaaagtcactatttttgtacaaataaacacatttacctaatttggtgagcatttatagagtcctgcctatattcaaggtccctgtgctgatcagtgggcaactgaagaagtatgaggcactgttactgctgtcttccttccctaattgggtcctataccttatcttggtacagctacctcctaaggaggcccatctgtgctgttgagggtacatctgaaggcagtgcactggaatgtatagcctaggactggaatttggagtgaggccctgagagatcatacacatttttcacttgtgggggaatgtccttaagtagaaatagatggtgatttcagatatttgatccaaacctaacttcctcatttgaattgagtatgctaataactattcttgaggctctggaatagtgatgacatttcctggttgggaaatcagatgctgatttctgaagcagagttttaaagttgaaagatgaaaagggaacaaaacaataaacacaaccttagactgaagggtcatttttctagtccaacttccctccacctagctgccacccaagattgtccctcagccatccttagaatattaaaataaatccattgcagtgctcaaatgacttgtttctatttgaaaatccttgccattggagaatttttctatatatcttaccttaatggctctccacgaattttgtcaacagtttgtcagcaatgtactcatgaaaatatctcatatctatgtatattctatcactttagcctccttgacttctagaccagcagttcccaaacttttcaaatgtgaccccttttagtatcaacttctgtttataaaagtacaaaagccctcacatcttatactttcttttatgcttttatttattgagatattagacaacacatacttgtaggtgacatggattcttagatctaaataactccactctccatggtcactgtcacttcaacacaggttgatgcagtccttagtttggaaaacagttttggcataaataatcccaaaccttcctatcacttcttggagcttttttcttcatgctttccttgcatctttcttaaaatgtgaagactacattggatatattattaaaataatgtcattattagtgctatgtttaaagctgaccttttcttcctagccactgatatagcagtgccaactgtggactctctttagaatgaacactttagtaataataagtccttagaacacaaacactgtcacttgtaaaacacttttctatacttggtaacctacacagaacagcggttcccagactttttcttttttttgtcttgtgggtcctttatatattcttacaaattattaaagactccaaagagcttttgtttatgtgaggttttgttattgatacttactgtcttagtaattaaaactaagaaaattgtaaaacaacacatcccattagctgtcagagcatcatcatgtcttgtaggctctggaaaactccactgtacactcatgaagaatgagtgtgaaagagccaaatagtagcttaatattattataataatagtttaactttgtgagctcaccaatataatacatattcatgacacagtccctaacatctaaaaacttacaatctaaggcccaacataaatactaatagatgatgctaaattctggcttcacagtgcttcctacaataatactaaaaatatatgaatttagacagaggccaaaatgtgtttattaaccacttggctttgcttagtattttgttacccaccttggagaattgcctctgctgatttacactttataagaagcagccctatgaaattttttatcataagtttaacaatgatgtagaacatactgtttcattttataatgatccttgggcaaaatgtataatatctgtgggagaaatgctcaatgctgcagtaaaaactatacttctcctcagaatcaggtatgttcttatatggtcagtataaatcttataactgtgctttctgatctcctttggccaccaggaagacaggagctgacaatccaacttactataaattcttcagggtctgatgtcattatttctataagattttccctggcattatcttatttctcaggtctcacttttcctttgttctgatttatttttcttaatatgttttattgtgtatttgttaatatgttttgttgtgtatttaattgccaatggggatgaatgaataagtgagaaagaaagatacttgatccatttgagtgggactgcttgagtacctggagtggtgcagaccaagcagggtaactgtatcaggtttcattaatgaaatgggtcttaagtggagattaggaaggaaaggaagtgggttgctggagaggcggggtgttttatgtgacagattggctgtaataaagatgcagctgtggagtgagtgagtgatgtcctgagcacagtaaggagatctggctgacgtggcactgcacctcattgccttaatatcttttcatttgattgaagaggcagctgagggataggtgctcttggaaagtggagtaaccatttccaattaaggaaggactctcacttcagtttctaaaataaattagaagggagaaaatatgaagtctgagagatcaattaggagaaagttctggtgctacatatagaaataggcttatccgcatatgcaggtgagagtacgaagaagaatctgtgaatggcagtcattttttgtagctggttccaattaaaattgattctctataatgactacttattggctgctgctcaccaggtctgcctttttcatcattgtctgcagaacatatcacagtatacagcatagagtaggtgcttcataatgtgttaaatggatgaaatgggttcctacctccaaaggagatggaaaaaaaaaaacaggcaagtaaataaagtaaaatatgtataaattgctttaagaatgttttataaaaaaggacagtagcccaacagcattcacagtaggctggctggagtagcagtcattgaagaaacccatgaaaacagcggcagaagcaaatgtgcagctgctctgccttttcacactgtagggcagcacacgaatagtcctggagcaccagggcccttagactgtgggatttttaagttacctagttggcacagcattgactcctcctctggtgtgattaggggccaggatacaataaacatatgttatgttggaactttgatgccagcctaaacttgccagttcagtgtttgtggttgcaggtagtatcagctcctctcctgatatgattgagagactgaggtccaaggcttcaggttgaacagaattgatggccctaaggattgggttagaactcttccaaagcacttagcaggaagccagtttacttttcttggatgccagcttccaagaaaagatcagtcttgagcaaaatagtccttcactctcagctcagaagcctaattgagagggtatcctataagtaacacagcccactctgctagtaacctgttctacttcaacctgtaaggcccatgaggctagccagtgacatcactacaggacacagtggaggatgtttaggaatggctgggtgatgaccagggtgcagattgtgtttactcaaggctgattgagaaatactgttttcagtggtgtgcttataaatgtttaacagtggtgggtggaaggggggctctggcttgtagcatttttctagtgcccatggtgtaaatactcccaacatgaccaactttaagttaccaatgtgattgaaagtagagtttggaagcgaggcacagtagcccactgttatgtagtatttttgccatacagatgcataagagacataagtaacctgaagaacatagataattattaaatgtagtaaaatgatcatgaagtgacagatcttgagtgttttatcacatttgtttttaatataatttaattttaagttgccataatttaatttgtaattaagactatgttaataattggcttatggaatttctgagaattcaaaaaccagtgcccataggtggatccagtacaccactaggtaagaacagcctagaagtacttctaggctcttgttctgaaaggtgccaagactggcatccatggttccagtgccagggtcgaggaaagacttactaggtcctgcagtattgctcccaaatctctttcagtggccagggaaattatcagcctgaaggcaggctgaatggcttgcttacattcaggtcccagtatctacgattgacaatcggcttcatttgtaagtaccagatagtgcaactccatgtatccaggaggctgggaggtactgagagcagactgatagtgtcaagagacactgaaatgactgccagctctctcctgccatatccactactaagtgagaaattcagtgacatagtcactgaggactccaccactgctgggtgttggggagggcacactgagtatttcaagacaatccgggtaagatttttcttggagggattcaagtacaaaatagttaatatgcagaaatgaagcagaaattattatacctcagaaatgagtcagataatactaaagaaaggaagaaaggaaagcatgacttgattcatgtctttaatgatgaccaaagaagttgggtctttaaagatgacaagagaagactgatcaggtagcagtgaggtggaaggggaaagatgagagaggggacattcctggtagaggaagcaaggtagacaaagtgtaggaatgtgaaagagcataatgtatgtaagtattgttcaggtgacttcttgggtacctagatagtagagagaaattagaggtaagaatggaggaaggggagactcagggccaggttgttgagggcattttatgccatgctaaggagtttccaatttttcctttcagtaatagcaagaaacttaaaatgagcaggggtttgtgtttttgaaagaactgggaaaacacctctgggcaatccattacctggggataatgggtgaaatttcccaagttagtgcacaggctgctgggtagggcttgaggctttcctcttgcctcctatttcaacactgtggtcttttaggacttgtcctcaacatgttcttaaaaggaatgtttgctaactgccaaaacagtagtcttcatatttattctgttcctttccaaaaggtaaattgaaaaagcaacataccctcagccaagagaattaatcttttatcacctaagttactgcccactgcctttcagttttaaagttaatttagtgtgcataaatggctatgagcccctggaactctctttatgtttgcatcttaaatttaccagaccctccttctgcctctagttccagaattttctttgtcttattttcttcaagaaatgtatttctttaaattggattgcaaatttggaatacacacagtcaaagccttttaaaaccattcttttaaaaaaggacaagtttcttgagaacatttttaaaggaaaaagttaaaatagatgtcaatggaagatgcaaatatgaatataaaatatgaaaagcatctataggctggagcttctcagtagagctctacttcatttaaagtcatattatctggcaccatttcaaagcttttggttacttgattttgtagttagaaaaaaagtataaagttgaaatattgggctctttacatgaccattttgctagtagcagtggatgaagcttttctctaagagatcaatagctttagtgtaaacttggtcaataccttattggaagaggtgactatgtcagattaggtagaaactttaaaagccagcaagtttccaaatgtccttctggaattggcctcctagggccatgtggaccagagagatcttatcacagaagtcataaactgatatccgtgagccaaatctagctcatgggcatgttgtttggcctacagcacattttttttttttttttttttttttgagacagagttcactctgtcacccaggccggagtgcagtggcacaatctcagctcactcaacctctgcctcccgggttcaagcaattccctggctcagcctcctgagtagctgggattacaggtgcccaccaccacacctggctaatttttgtatttttagtagagatggggtttcaccatcttggccaggctggtcttgaactcctgacctcgtgatccacccccccgcctcttggcctcccaaagtgctgggattacaggcgtgagccaccacgcctggcccacaccacatttgtaagcagatgaattggttatttttaaaaatttgaagaatttaacaacaaaaacaacaacaacaacaacaaacttttgtgtccagcttctttttttttattgtcccaatagttaaggacaatcctgggcctgcattctttgaacagttggctagacttaagtagctgctgccccttttagatggggcaaacattctctactttttcacagtccccttcaagggtgcttcagccatttttgctactcacttgtcttcaataaaccaaggtcatgtttaaaagattaaataacagttattgcatgctcaccaaaccgtcacaaggaaccagacttgtgtaccagaacagagtcctggagcatatctctgttaggctagacatcactcttttagttatgggatcatggaaaggtgcagaaagttccagggaaggggtcgggagggatttggtgagtgaggcacttggaggcatgggtcaatagcttttcaccagctagcatggaagtacttttagtgtttaaaaacctatggcacagtgggatcttctaggaaagtagaccctggagatggagattcacatgtagcacatttattaggggatgccactaggatcaatatctgtaaaagagagagaaaggatgtaagagtgggcagagggagaagttgagctgcaaagcaggcccagtgccagcctcaactggctccataaggagctctggctctggaatgcccttttatatttgtttcccatgggaccaggatggctaggccattctactctgacatgcatcactcactgaaagtgggaagagtcttgctcttgagtgaggaaatcccctgctactgaggcaatccctcaaaggagtaagaagtgaaagctcctggcctggagcacctgcaacatctgaaacaagaaatccttcattgaacaggatctgggcagcacaccagagtgatcacagtcagcagctataccagtgacaacagatgaatatcaactctgcctttagcccctagggtatgacacctggcctaccaaggctgtgcctaaactctttggactgattcagaatcaagcaagtcctagcctaaagagaggagtttaatgtcatgctacgctctagcccaatatttgctgacttgtaattcagtcattaaaaaaattctttttatcttcacatagttttagattgtcaaactgttaccgttctgtgtccagaaattaaaatctattctttctattctttttttttttttttttttttttttgtgacggagttttgctcttgatgcccaggctggagtgcgatggtgcaatcttgtctcactgcaacctccgcctcctgggttcaagcaattctcctgtctcagcctcctgagtagctgggattacaggcgcatgccaccatgctcagctaatttttgtgtttttagtagagatgaggtttcatcatattggtcaggcttgtcttgaattcccgacttgaggtgatccgccccgctcagcctcccaaagtgctgggattacaagtgaaatctattcttatattttattgtaacctcagaaaagaatgcttttttgaggactagagttctgtctcttttattgtcttctcctttctctttcccaaacctataactctattttgcttagcacacaatgaataatcagatgtcttaaattgtggcttacataattactagtataacttttttgcttttttttatttcattttaatctgttcatgaggactgttacccaggtatttaaaaaatctcactccattgttttaaggttagtggttccaaagggattttagagaccctgacccaataatagttatatttttctaagtggttctgaagcaatggtcacaagtaagaaactgcagttcaaaacacatcataggtttgttattttccaaattcttattaaagcattaatgcaaatggaattttcctactagtattctgctttctctaatccttgacaggactaattgctaaactataatatgatttattataattttatgtttatattaaaaatatagaatatgattgccctttgatgtcaaatactaaagatcctgctactattttagttgtgctggttcttttcttccttatctttcattcaccttttcaattcatctcataaacatttaatgaaaaacttattgtgtatcaagggttgtttattatatgatttgtaattcaaaaactttctttctctggtctgagaattttagaaacatgaaaagaaagagggagggagaccaactgagagtataaaaataaatctggcatttattaacagttaaccaatttcttttttctataataatttatctactaaactgtattttttaaattattgttttagtttttgttgcatatatttaaggtatacaacatgatgttttttataattactagagtgaaacaaattaacaaactcatctcctacatagttatcttttgcgtgtatgtgtgtggtaagagctccagaaatctactctattaacaaatttccaatatgcaatacaatattattaatgatagtctttctgctgtacgtcagattcctagacttattcatccttcataactgctactttgtaccatttgaactacgttttcacatcccctgtgaaaatgggaggggggccgtaccatttgcatggaatatctttttccatcacttaccttttactgtatgtatgtactcagatctaaactgagtttcttgtggaaaccatacagttggatcttcattctttacccattcagccattctgtatcttttttattgaggagtttagaccatttacaatttaagtaattattgatagggacagatttaagcttgccattttgtcaactgttttctatttgtttataattcttttttctcttgctctcttcttcagtgttttgttggatttttatgctgataggttttgatttcttcttttgtgtaacttctatatattttttctttgttgtcaccaaagggcttacataaaatattttagagttgtaactgtccaatttatgctgatagcaacttagcttcctttgcttataagaactctctgcttttacctcttctcccccattatatgctactaatatcccaatgtacatctgtttatattgtgtatgtagtaacataatttagttatagttgttttaatacttgtcttttagtttttatagtagaatgaacatatttacctaccactgttatagtaatacagtattctgtattattttttaccaatgtgttccctactctgctgctttctttttgtttcaattttaagagctatctttggcatttcttataaggcaaatctagataaactctctcaacttttgtttgtctgagaaattatttatcttgcctttatttttgaaggacaggattgctgggtatagccgtctttgttgttaggttttgtgttttttttttcttttttcagcacttggaatatatcattcaactcccttcaggcctgcaaggtttctgcagaaaaatcgtctgataatactacagagatttcattataagtagcaagtcacttctctcttgctgctttcaaaattctctttgtcttcaacttttaacaattataatgtgtcctggcgtgggtctctttggattcatcttacttggtgtcgtttgggcttcctggatctggatgtttattttcttcccgggactggaaaatattcaaccattatttctttgaatttttttctctctctcttctccttttgtatattccgtaatatgtatatgggttcacttgatgttattccaaaattcccttaagctatctttacttctcttcattcttttttctttttgcttctctgactggataatcatcaataatctgtttttgagttagctgatcttttcttctgtttgatttagtcttctcttgaataccttctgagtaaaaacaaacaaacaaactgtttttcctctgctttcacagttcaacagcaatcagtaaagaagccctttgtgacaaaatgtgtgtttagggaaggggtggtttccttcacacaacaagtaagcaatcagttctgcagtaaataccagtttggtgtcctctaattcaattccaacacttctactgagagatcctacagattgggggctcagtccccgagactgtcttcctcaaccaacttccaatgccaattgcaaaccccaggttattttgcctgtacttcttactgactggctataaactgaggttcccacaacccccttctgaggttcaattaatttgcaagagtggctcatggaacttggaaacacttgcttatgtttatgagtttattataaaggatattttaagggatacaaacaaacagccagaagaagagatgtctagggtaaggtcaggaagggtcatgagtacaggagcttctgtccttgtggagttggggtacacaacccttcggacatgtagatgagttcttgttcaccttcctgtaagccttcacatgtatagctgtctagaagctctctaaatcctgtactctttggccatttatggagacctcattggataggcatgattgacaatcatgtggaaatgtgattggacaaaaagagtattagctagtgctaacagactgaatggaaaacccagaaaggcctgtctgttcagattcttcctggtctctctctgcagcattctttcctccagggaatggggcaggaccttttttgaaatgaaaatcttatgacctacaatcagacaaagtaggtcagagaatttctttatggccagaggcaggggaagacttaagtgtatttttagtttctgttgcctgccttatggagaaaaaggaacaggtgaatagagggtaagagaaagtcatagagagatttctgttttttgaggcctgcttctaatgtctaaagcaccccagcattataataaaagactgtaataagagctaaggaagttatgagccaggaactgtggacaaagtaatatcacacccctctattttttttttttttttagtttacttactgtattatttatttccatgatttctgtttggtactttttaatattttctatctttttgttgaaatctcactttgttcatgcattgctcacataaactcagtgagcatctttatggctgttatttttaattctctgtgaaatcagttacctccatttcattagggtcagtttatagaggatttatctagttcttttgtttgaaatatattttcctatttctttattttccttgactacctagagctttctttaaattatatgaaatagccatctctcccagtcttgtcaaactggctttgtgtagcagaggtacctcaccaatcaacttgaccagagatttgtggtgcctcttttttttttttttttttttttttgagacagagtttcactcttgttgcctaggctggagtgcaatggtgccattcagctcaccccaacctccacgtcccgggttcaagtgattcccctgtcccctgtctcagcctcccgagtagctgggattacaggcatgcaccaacacgcccggctaattttgtattttttttagtagagatggggtttctccatgttggtcaggctggtgtcgagctcccgacctcaggtgatccgtctgcctcgacctcccaaagtgctgggattatagatgagagccaccgcgcccggcctggggtgcctcttaaacttttgtgcttattcaaaccaccagttttgttcttagtggccctcggtaggaatgtcccaagtcctaagttagtgaccaaggtagagaaacctgtccctcaagaagcagctagaaatattggggctctagatgagtggtccatcttcctctctcctcagggataagctgggagctggactttataccccactcactctgcagtccagatagaggatctgtgccaaatgcttgtgctctatttcagacaatgctctctttaaacatttactttgctctctcaaatggcaggtctcattagctgtcctggataagtgaattagctggaagcttggttatgtttctggagtgaggagctgcaggaagtgccctcatgcctgttcagactcccggagttctactaattgcctgctccatcagctccctgatgcaggctaattaatagcttaatccacggacagcagctaggaaagtcagaatattatgtatgcagtctaactccgtccagggagaaactgagagctgggtgtttttgcttgctcactcttcactgagcttggggaactagctgctggtagtgcacatgagctcatttaaaaccacttctttgttccttgtggtcttgggggacacataaatgccagtcccccatagctcccagagctaggtgatttcagagccagtctctcaggtgggagctgtaaaagttggggtgctcaatgtatggacaaactccttccaggagagattagatgcttgattttatcattggattgagctgggggagaaggcacaggaagtgcccacacactagtgcccacatacataccctttcaagctcccagaggtcttactaattacctgccccactggctcttagtccacttagtaatgctataaggaatacctgttgctgggtaatttatgaggaagagaggtttatttggttcatggttctgcaggctgtacaggaagcatgatgctagcatctgcttccagtgagggcttcaggctgtttccactcatggtagaaggttaaggggagttggcatgtagaaatcacatggcaagagatgaggcaagaaagaaagaggagaaggtgccaggctcttttcaacaatcggttctctcgtagaaactaagactgagaacttaaccactgccctgacaagggcaccaagccataaatgagagatcattcttatgacccagacacctcccacaaggtccacctcccacactggggatcaaatttcaacatgaagctttctggggccaaacaaactgcatcaaaatcgggctcccagttttagactatgtagaactttaatccttgggcagcagctgggaaagtgcaataaaacccctaccagagagaaactaggagttgggcaatatcgcctgttcactctgtactaagcctgagggaattggggtaggaagttcttgcacacctgtttaaaattgccaccttgttctctgtggtccagagataattgcaaatgctgagcctatctgcttccagagctaggtgaattggtgattatggtttggctctgtgtccccacccaaagattgatcatggggacggtttcttccaagcattctcatgatagtgagtgagctctcacaagagctgatgaagttttaaaggtgtttggcagttccccctttgctcactttccctctctcctgccaccatgtaagatttgccttgcttccccttcaccttccaccatgattataagtttcctgagccctccccagccatgtggaactgtgagtcaattaaacctctttcctttttaagttacccagtctcaggtagtttctttctagcagggtgaaaacagaataatataaggagcaagtccctcagggaggagctgtaaaagttgaggtgctatatgtgtggtcccaaccctttaacttctaagaaggtaaagctaggagttgggtttccttcctgattacaaagtgatgtgcctgggtggtgctattggtgtgaattaaccaatttcttaaacatcaactaggtgttccaaactgtgctaagggctagggaaaaggctttgttatccttattctgagagagcttatagtctgattaggaataagaaaactgacacaaaataacagcaaataacaaggcaacataatcagttgctacatgttatggtggtatataaatgatggtagaatttagaaaactgaaaggggacaggatagacaagagtggtcaggaaggctgcatggaagagaaggaacttgatttgggatagaagaaggggctgggatttgggaagacaaaacaaaagaagagggccattccagtatccaagtaatgacagatagaggcacagggcatgtattaacacgagaatagcagaagtttgatgttggttagaacttactaccaacttcttacagaactttcctctaagaattatgagtttgaaaacattcaacacctcaatctactttcaagatttcctggcaaagtgaaggaagcaaatacctttattattttacaactgaagttacctgttttgtcagttatgatctaggctgattctaactacctatgggcaacctagaacagtcaaaagagctaggaattcattcaaaagaccaaaatctgcattgtctggtagtgtgagcatgagcaaatcacttcatctccttgagccccagttttctcatctaggaatgaaaagtagagccttatctatctgaccaggttattatgctattaagttatataagtaaatgtgaaaattcttcttaaacaataaaacaatataaattttagttggtacttttgttaacatctacactagaccacgtttatataggtaatttaaaaataaaaaagaatggggaattcattcttatgtcatggatttatattttttttgtagtacaaagttaatcgctcagcagtgtttgttacatttcaagtagcaaccatcatattgccatgaaatttatttagtaacccctaactactttttttttaatgaaatagcatagaatgaaagtatagtgtatattgtactttttagggcagtagattatatcatttgtcataaagatgagtgtcgtttagtgacacacaaaggcataagtgacatacacactggtcaaaatgtaaaatatatttctttttgtggattgttgtcaaagaagattgaaagacactaattaataatatagtatttcaaatataaaatcctcagtcttcatattttgaaccctcaaattaaactaaccaaaaagataaatttcagagaaaagttattttatgtaaagaaagtgagattttgatgaaatgagacatgctaccacatattctttattttcttcttatgtctcttgctgaaacccaaattctgtcttcacttctgctgcccaagtatacaaagcaaagggattttttgtgtgtgtttccatcaaaagctacatgcctagaaactcattgtactctattttttctggtagctcttgagttgtttattttaactatcaatcaatattatataatttaaaaataaaaacttaatttgtgacaaagtaagttttcagtctgggttcaggaaagaaagggatggcatatgcaaaaatgatgtaaccaggaagaatgcaataatatgtctatgtacaagaggggtgatagaattaaggaaaccaaccaaagatggtgaagaacccagagctaagaaaagggtactagctcccaggcctgaaaggtcacagtgttctaggttccagaagtgacactgagcagtgggagaggagcaatattactagtgccatcatgggaaaccagtcttttcaggaaagagagaggcatggaggggacaggtgccaatggctgaacccaatgaagaccaagggttctgggcaatgtcatctgtaatggccaacttcctggggcacagagcagggaagacgagagtggaaaatgagtgtggagcaacaaatggggagtaaccagcaacctattatatgaatgatcatttttcatgtcagatggtggcatatagcttttctactcaaattcagtttccttcctctgtttgctaactggcctagaccaatcctgatctagcccatggtagtttactttggttcctagctgttgggtagccaaccagtggtgtcttcctgcaggaacttcttagaagggccaaagataaaggatgaagtgtcctcattgatttcatagacacaaccagttctagatcactggttcaaagagggtaataaattagtaaagtgggagaacacgaaattaggaagattcatttctgctttattgtgaactgggtcaatttttgctttcttaatattaatcttgaaaaagatatcctttgaaatctcaaaatccttttctgtaatttaaaaacaaccttaccatctgtgtcctctgtcatatggtacaatattcaagagggtgaaataatggtccagtgactaagaaaaaccttaaaggataaattggccttagtgactgtcactaaaatgtaaacatggctttaaaaagtaaatcaggaggcatgaaagggccttgacagctaaggctctcaggaagggtctagaaagacatgaagcacaattttataagtgtgatataggagttactcttctttttttattcatgtgtcatagaagggaaaggaaatttctaaaggagtaagaccagccagatatcacaagaatatacaggaatgtaaggatagcatgttcaagggcaacatgaggagtcaaagaaaatgtcctggatgccaagactagctgtgttcttgcagctgctggctcctccttggcaaacacaccattggcaatgaactgatctgatgtgaacccctctaagtccttgagactctctttttattgcaaagcttgccagcctctttacccagtacatgtactccactctaagaagaaaaaacaaaactaagtgactgctaagctcatggacaatgtttttgggtctctccagcagccagctagtggctgactaggtaaaatcatttatttttctcaagatgttgtgattctgggaatgcagggtttggctgccatgttagcctggattttctgagatgcatccctgcaagagattcactgggaaattagatgtgcaagagatttatctggggaaatgcctatgagggaaaatggagaaggagctgcagaaggctggaagagatgaccactgcagtacaggtctaatcccagtggaaaaaaaaaaaggagagaaggaatgagaaaagggaaagagagaaggagggaagaaaggaaagaggtagggagggagggaaagtcttagacatcagtgcagtgccaagaaagttttggcaaggctgatggggagtcttcaaaccaaagtcacttgaaagaggaatcccctcatcatccctctaggaatgggcctgccttggtgtccttgtcatgcaaagtcactggctgggtggatttcagagcatagcagctgagggcataggccagttacactctgccataggaggcttgagagatgcattttcatagctgccacatttgccactgaaaccttctgggagtgatgggttgtgctggaagaatttgaagatactatcttatgctccagataaagaaatgcattgatgaaggcccttcactattagatttatttttgtgtgtcccaactattatataaattcccctatcaaggaattttcagtgttttctccttgcccttagatatgtgatcttatatcccaggtttgctgagacattcctcttacagatagttctactggctcatgagtgtaatgtgtctaaatgtatggttggaaaaatgtggttattagatctaaattttaagtccaaatttccttagcctgaagtttagagtcttccacagtctagtcccaaccactttttccaaccttaattaccattgcactttatcctgtatttcaattcatttgaaatatttgctcctttctaaattactcttgcttacccaccactatctctttgttcatactgttctcttcaactaaggttaattaatcaacatgtatttattgcccccttcccatgggccaagccctgtgcttagaactgtatgttaggggacaaaacgcacatggtttctgtcttcttagagtttgaatttagtagaagaggaacagacaaatacacaggtcaatggacagtgcatgcttacaaatcatgtgacagtgtcaaaagtaaacaaagagggttccctgacagagaattagaggaaggttttattttagatagagctatcaggaaagaaatggcatttcagctggaacttgaatgataaagggaatgtagttactaaggacttaagtcctgcaggtaccagttccatcatcttcaagatattgccatgatcttcacaaaatctttactgactcatcattggactctcaaccaattttagccctgtgctatctgcatcttttatatcacagaaagtgttgaagttcatactatatactaaatgtgtttgtctccaatcagactataagattgtggaatgttagacccatgtgtgatgtatgcctttgtatcctatcagattatatgattttggaaggttagagctatgtctgtatccagcataatatttatctctgtatctgcatgatacttaggataatagtatgtggccacatccaacaaatacttgttgaatgaataaacagtattccactctctgcaaatttggtctttctgacatttgtctgaattatagaaggagaaggaggctttacataatagttgaaaattactgttcatgtaatacagagttctgaacttcaaccagaagcaagtctacagcagatgaaaacatttgtaatgagggaattagctgtggataactttcggataggatgttataagtttagcatttgtattaaaatccattattatatgcataattaagttttaggaagaaaatctggctgaatagtaaacaattactattttcaaacagttcttcagcagttagttaccactggcttctagaatttaactgttgttttttttaatatatcaaactagcatgtgggttgagacacaacatcacattacaaatgggtagtcccttcacttgtagatcaatcagtaataatatagatactgatttttacagtttgtaaaattattgtcatttctttctcttattatctgtattctcagaaacaaagagtataaacaaagagaaagggcatgatgtatttttgataggctaccatctcaaattttcatttcaatgtttatttggagaaacacttttatctaaaatggaccttttccattttacaattgcacttgctctcagaatgagaactgcaccttccaggagagatttcaatctgactccaaagccttgaccctcacaaacagtgttgtttgtaatggcccctggttagaaactctcagcctaacaagcatgcagcatagcccctgaagtctctcctcctatctgcataaattggggatgtagaactcctgcatatccagcctcacttactcataaaatgctgggaatcattccaaattgctcttccagaggagggtttgtttttaaaattatttcagatagagatgtttcaaattctacataaatgcataatattatttctgattgtgctttcttggtatttctcttcctgtaacacctacttagccattctccagggaccacttcaaggacttttgtaatccatatagctttcctaagctgttctaactttcagcaatcccaaccacatcactgaccgagtttgtaatgactcaccagacaatgtgttgggtcctctagtaatactttgttaattccaagttatccttgctgctgttgtttctccgtgtgtgtttctatctgcgctctccagttaagctgtaatcaacttaaccactgggctttgtcttatactctacttctcacaacccttgcctcttaaattggttaatgtatgtttgatgactaattgtacacataatagctacttgataaatgttcttaagaaagggacaaattaagtattttccctgataatcctctataccaggcatcgctgtggaaagctgcacagttgggaaagcgtcatttcaaaaacaggaaaaatcacctgtaaattatttcagggatttgactttgacattatgttgacataaaagaggcttaagaacagctattagaaaatagaaacagataaatgaatgagtgaatggcatacctaaatggcatgaaatgtgaaaatgatacaaaatgttaaggtaatccttttttcttctctaattaatctccactgggtatggggaatagggaacaactggggtattcgtaacaggcaaacattcctgattcttgccctactaaaggtagggacattaggagaaaggatcatctacttggaaaataaactggcattgctaagtctaaatgattgagtcaagtgcaaattttataggccaaatagaattttcacaagtccattgactgttgaaaactacttgtaccctggctcaaaggacattttcttgctgtctgtagtaagcggtctgtaaactgtgtttaggacctgaaccgaatgctggcctttcacttctcaaactatagcttagtaatcccagctcagaagtccctccatacacaatttagtaaaattaacatcagagcataaccatgctttgttccctccagaagtaaaatgtgaagtttcttcccattggaagtctatttattattagtttcagatgttgtgacaccgttttcatccaaatgttagagaacagaaagaagccttttttaaaagcgtaactttcattattcatctaggtttttttcagggtccttgagaaatgctaagattatgccttgtgtttgagaagtagaaaaggaaaaagggaggaaaaccacctagagaagtgcttctcaaactttaaggcacacatgaatcacctggggaccttgcagattctgattctgaaggtcagaggtggggcctgacatcctgcatttctaacgagcttccaggggatgctgatgctgctggcccacagaccatactacctagagcagcaagctttataggccatagaggacattttttttttttttttttttttttttttttttgcatggagcacagattactgctctactctaggttacaattccaaggaaataatgactaaagaaaaatactgctgtttcaacatttctgagtcatttagtaagaatggaaggttaacattagcaatttaacatttcaaatgtggtgggagtatttattgatgtactaatttgcattttgttcctgccaaatctttttactctgttggctccagggagtttgaaagtctaggacagaatttttcttcctaggtttgtttacatattgtggaaaagaagtgagcatctttggagttaaggagagttaagacccaaggagaagaaagaaaaagactatgaaagatttttaaaatgtttatccctgtgtaagatctccaaagcccctcccttgacccagtagtagcaaatggagccacagtgatggctgaaattgaatatcccactaacttggtaaaagttgggcaggctcccagtcagacttaaatcattttagagaagtacaataatgtggcattccttgcaccctggtgatatgcagaaaatacatacctgcttccgacgaaatttaaacatggactgttaacaagaatgtacccttaaagttttgtaaactctacagcaaagaaaaaaaaaactgctacagaaaaaataaggattttttttctagctttaccagcgacctatactttcatttcttcatgttactaattacagaaactttcagcagaaatgtatcactcttgggcatcagttagttctaaacattttagctcttaggagcctctgatgacatctgttctgttgttagttttgctccctgactagattgtaacttctaagctcaggaatcatgtctgcaactacttttctttagtcctaacctaaccaagagctaggcatttaggaaatgctcactataaatgtattgacaaatgattatgtataattagctcttcatcacaatatttttcatcatcaagaaatagatttaaaggagatattttcaaacagtatggatgtatcatccccttacctttatgtatgtgtctggttgtgaatagtcagcacatattatggttaaactcaagaaacaagggaggttattttctaagcctgcatcatagcagtagaaatttggaaaaaaacaaaaaacaaaaaaaaaaaaacatagaattaattgagttgtaatcaaagaaaattatgtgactataaattgtaatatttctaaaatatacccacatatgccaatctattgtaagaaaatgttcgcagagggaaaacaatggaaattcctagaagctttagatagattctaatgattggaaataagtattacaaatggtccacattttaatgtgacttctagaattttttagaagtcatagtatcctttcacgctcttatgctgcttgcttacaacatacacttgggtcacgtttttctgttaggaaatatcatactaatgatttgtgatcatatttaccacttggggatcttggtggccatgataaggaatttggactttattctgattacatgggaagccactagagaattttagccagtgaggtagcatgatcttacttatgccttaaaaaggttaattgttttggtagttaattgaaggaaggcaaaagtggaagtaggaagtctagttaggaaactatttgattgttcgggaaaaaggtgctggatgcatgggctataataatagcaaaggagatggagagaagtgaatggattgagatggaactgaaagaacttgttgatggttaaatgagttggaaggagttagagaaagcaaagtgacaaagatgactcagaagtgtttggcttaagtacctgagtggatggtgaaacaattttcagacatagagaagaatttaggaagaacagtttttttcagacattgctcgagagttctgtgttaggattgagatacctattagataccaactgaagatactgaagaggctgagtagagtctgaagttcaatggagaggctcagactaagatagaaatttggaaccatcaatgtgtagatgatatttaaagccatgagactcgatgagattccctttgcaggggaaaaaaaaaaaaaagctagaatattggagggaagagttttgtaacaggacaatatttatgggtcgggcagaggaaaagaagccagtaaaggagaccaagaaagaacagtcggtgagctagaagggacaccaagtggctcaggcatcctcaaagctaagcaaagagcatatttttaaaagacagtaatgtactgggtcaaatgcctctgagaagttaagtaatataagaaataagaagggactattgaatttgatatgaacaggtttagtggaatggaaggattagaagtaaaaccaaagtagattcagaagaggagaaattaggaagtagagacagccattcagacaaggacttaaaagatccaggaatggaaaggaaattcctgggagcgcaacccctaagaagccaaaaatagagtatgctttccatgtaggtttttaattcttttttggtggtgttctttagaaagagaaatgtctgttgggattattgtttgaaatggtgttgggggcccaaccatttctggcttctatagatcccctttttgtacatgctcattcccttaaaaaaaaaaaagaagaagaagactagattttctaatttagggcaaggggctaatagcaaaccaaactcatttgtaatctaaatggtcacatattattttggttgctcttcagtggcactagctgctgctaggaagttcattttacacacacacacacacacacacacacacacacacacacacagcatttgctgcagatcctaaacttgaagccctggatcttccttacatcatttacccagaagtatctttgtcaaccttcttaacttacatccaccagaaagtagaacaaggcagaagttgtgtgggagttctgttcctccccatttcccccctcacctgctggcgtcagcacaataaatactgtgttcagaacttggctaactgcttcttttcccacattcgatcagggaatacttaaagccatacagtgtccttgttctgccaaaaagcatatggggcaggttgccccttcaggctgacacaaagacacactgtgcaagacatctatggccagtggagtggccgtgtatgggttatcaatgagacttttgacttttttctttatgtcatattgtcatcacattaaatagaattcaaacaaggaaacaaaatttatattctagacttttaaggcattgcctgccctatagctatgaaacttttctttttcatacctggtataattttccactttaaacaatgttgtgtgatttgattaccgttttgactctcatttaattgtccattttaaaaattttaactgaagttagatttagatttaaagttcaatacccataaaggatacttctcaatagagccgagaacttcagaaggcacaacaaaaaaagggcaaagttcaaaaaactaagcatcaggtagctactttttactgcccagggacatgtctaggtaaactgtcaccatatccatctacatttgcttgctagtagagcttccattttctactgcaaaatagtttctggaaccacttccatgttggccaaaagagagtgtcaacaattcctttccaaaattgacctttagaaagtgaatctaaaatgtttgattcaagtatgtgaggggagctgcatcaaagttttcatttttactacatacaaaagtgacagataaatccgtaaaatgtatgcatttttctgctaagactgctaattaatttaaaaagagattgttagaataaaaggtcagagagtaaacatattacagatatttattgagagcctgctgtgtgcagagttggaaaaaataaaatgaggttgctcctttcaacagacttacaatctaattgagggagcgacagcataaatgtatgcaaagcaaataatgcaagatacagcataagacataattaactatcagatgagtgacatatataataaataccattaattcacaggcaatcgtaatcagaagcacttaacttactatgtgccaggcattctgctcagtacttcacatacattatttcatttttttgaaatattatttctactttatagatgggaattggctctgatcttccccctattctggagaaagcaaggataatggtgtaaggtagacaaagacccaagcagacatgttggtctggggcaaaggtccatttaagggaatggagagaaatgaaccctggggccagcattagtctgtttacaaccatatcccagtgcctagtatagtgccttgcacataataagtgctcaataatatgtcttgaaaaaacaaatggccctctggtctgtgcctgtaatccagatcaagtaccatggaataaagttaattagtgaattaaagccacataccacatagcttaaggacccatccccaagacctcccaattcccaactatgacaataaaggattgcagtggaaaagatacatcataaggggaatagcaatagcaattccagctcactggggtctatttcatggaatctgacatggtgaacagttcataagtttatttccaggctgcaagaccctgcaacatctggcctcttgcacctccacaacctcaaatccttctattcttctctcactctctctactcctgccacacatacctcccttctactcctcaaacccatttcagggcctatattcttgcttcatattgcctggaatgttcttccacaaaacatctgtgtggctcattaccataccttcagatctataacagccactctccccacatcttcccagctgcctgacattataatacacatctatttccttatgtgttcatccccgtacacactagaacatgggcccaggaaggcagaattccatctgctgtttttgccattgaatgcccagcaactaggacagtgcctggcacattgtaagtactcacacacagcaactctaactcaggattactttttctagctctgaaatacctacttccaagagaacgaaatttattcaagaaatgttggatggaaattgaagagtgagcttggaaacgagacacagagtggcaggagcccagaccaacctgtttatgaaagatgcctttgcccatagagggaaaaatacaccttaaaacctctgccaaagtatatgctttcttaggacacctctgacatgctgaattgcacctggtctgaacaagatctatgaatttgccaaaacaactaattcctgtgatttaagagtcactactaccagtatcagcctagtaaacaagtaccaagcaacgagcaccacatatgtcagtatccaaagacaaacatgctgctgcatgcaaaaccagacaaatgcattcacgcgggtgacagtgagtggaagaaattaatcttatttttattattttttcccttatcaaacactagcaagggactagatgtcataaatctagttaaaatatgttgactttgcctcaaatttgagcattcatggttccaaaaggacacttgttataggatctgatgatgtactttagaatcttcttttgtgcaaattgagacttcagagaactcaaaatatatggtaaattcaaagtaatattataagtaaaatcataatgcctcacaacattttttgaaagttaaatatttagtaattttacaaatatgtattgagcactccctatatttaaggaactatgctaatgctgtgatggatcaaaaggagaataagccatgatccttaccttcagacttcaagcttattattcattgggcagttagataactaacatatcagacatggaataataagtgccattgtccagatattaaaaacaaaattggtgttgtggaagcaaaaagaatgtagagatggatcccaactaggagaaagaaaaattgcttcctaaagaagacacagattgaccatgaaaggtggatggttctacacaggactagaaggtaggaattcttcatttgttggacttgctaattttttttggtgtaaatatacccactgttgttgatttaaagttgataacgtgatgcaactgaacacagaactgggaagagaaggtggctccagcacgctacctatgagtcaccagctgagctccagacttaattaaatcaacctcctcactactattttgaatgagtgaattcacaagtcttaaaaagatctatgataacattataagggaagagatagtcacttctgtcattctcccttacatctccatctcaccttccaatattctgtttgaatatccttccaatttcagtcatatgttcctggctggcctacctaggattaatattggcccagtgccaaaatgtgattctatttattccttttagcattgctgtgattaatctgcgctcctgttatcccatggcatagcaaactctcttactgattatggcctggtattgacacctctgctgttctccataacgaaaagcagcttttggggtggctagctgggcaggatgttttgctgctcttgtaacagtaggaaggaaaagctggaggaattactgggaagctttgcagaaggaagatacaggccagctgagagccagcattcatattgcctgttcctttcagtattctttgtgaaaacaccaccaccaatgtgttccctggacgtcactactgcacctttaactggccttattatgctagggactgcatttgaaaagccaaactctagtatctgtctgtaattgcaagcggatatctcagcacatgcacaagcttatgtcaggaggatgtttatgaaaaactcaccaagcagaacactgctagacaggaaataaatatgtgaagcttgaagttgttaggaaacttccacatttgtccctctaagccagagataggacctgtgagaaaagaaggtctttatcattgcgcattgattcttgctgaacccctgctattctcaaaatacatttacagcaaaatgtggctactgcagatgtatttaaacatgtgcttttttaaatgacactggtttatcttccaagtttgttatctactattttactgtaaagcattaaaaagtgtttgaaaccaccagcaccatttcacagttcctgttttatttgtttaaattctctagctcatgtaatatgctgtatgatttactgttcaagtagagaagaaatacactccctcatggagatgtggggaggtaatactgtctcttggaagggctcagagatttcctgtttagattacacaggcttctttagagctgccaagagtcataacatgtacgagataatacactttggttcaggaaaaactatggataggaatgtaattaattcactgagccacaaaagatattccagcttagaaatgtcactgcactcaggcctggtggactcagtatgccaaggggtagccatgaccaaaaagaggattgctgcctgaggacccactgagtagtatccaaccacagagcaaaaggagggggcctggctgctaaggacatcacacgtctcacctgcttctttgagaattgatccctgaagggtatttctgcccaaagcctcagcaacctggcttcatcaatataactttgtgatgcttgtgacattgagatcaatcaatcagcatgtactttatcaagtgcctcctcatgagtaccaattgtggcacatagtggggaaaccctagaggcagagccctgcagaggatatggtgattctgaccagagcaagaaggtatagtgaaaagtttcctaaatatattttgtgtcttgtcataagaatcacctggcagggaggggtatggaagggcaaggtaagcatacacattcccaggacctttccaaaatgtagagtgaccagggacttagagattcagactctatcaatctggggcagggccctagacttggtatatttaataactgctgtgtgaggccctttacatgcatgacctcctgtaattgtatagcttggttgctgtatatggtactatgtttacttgtgtttgcactgtctattcaggggtgtttctaaatgccattgctacacaactggtgaattatgattcttgccagaacattgattctcctactcttgcttccttaatgacacactagagaactgggattggctgcatttagtctcaggatgaatcattgccataagtagatttccatcccctactccaccaactcatttgccaaacacccttaaagaacagaacccactgcctacatgcagcctgcaccaggagggcctaaatggtctagctgggtttatgacaacatcccgtcttcacatcagcaaaaccctaagtgcacaaagtctaatgtaaacacaatgtcaagttctccataggaaaagacatgtccctgctgtcaaggtagtgactagcaataataataatgacaaaaacaataacaatgataagcatatataacacttacttatcactaattatattgtaaatgaaatgatttgcatgtactaactgatttaaatcttatatatatatagatacttttactctctcaattttaaacacagagaaaccaagacctagatacgtgtttctgttgagaagttgagtacaaggttgagtgtaagtagggaaagttcaactgcagtcagttctagtcttggtaagtacactgtgaggcgctccaccccaagcatagcaaattaatggttccccagtgtttgcagaatcaaaattaagttctttggctaggttctccctgatgtgcccctgcttcttccctaattcaacacatccccagctccatccatgcattcccaacacatcacagctctttacatgcccaggctgtgtcttctgcacctttgtaccttctgcacctttgtttccttggccccaactgccctttcttttcctccacattaccctttatcccaaatttagcacctgtctcaaggagtcaccttcccaaggaagtttctccaaatttgttaacagatattccattgttcctccaatgcttgaccactcttcctttatagatccctgcctagaaaaatgtgggctcactgaggccaggggctgcagctagtttattttataacccagcatttaaaagtgcctatttattgatttgttgggaatagttaataaatggagtccttgcagatcataaccaagaccacagttcgtaatggtttcattaactttgttactattggatgtgattctctgcttatggtcttcctttacttgtttttcccttactgctcagcacctctagacattaggtacatggctctgatgctaattaaaattgatgactgagaatgacacttccatttgctaagccagcgcagttttgttcattgtgctttactttttaaccagcacccttagcataaatctgtagtctttccatgagggtaccatttgttccttttatgtctcgattcattacatattttcaggactgttagctgactaagactttttgctttgtgaaaatgtcaccaaatgcacgataaaggcaaagtcacaagatgtctgtttgcaaaaagaattaaatgctggtttgtgaagattcaaggctggccagggctccccaagcatttccaggccagagctttggctctgcactctccttaggatctcataactgacccccacattccatttctgccatcgtggaaaaatttgtcaactttactgctgatgttaggcctggaaattgtcatccattagttttctcagattcaagctgaaaattgagacaaacttcctacgtaattttgaccaaaataacacatatgtttatgtgctatcccatgattaacatatttttaaaaccactttattgaggtatggttggcatacaaaaatctgtgcatatttaatgtatacagcttcatgaatttggagataagtatacatccatgaaattattactgcatgtatgccataaacctatcacctacaaaaatttcctttcactttgttattattttgattaacttaatttttttcttcctttgaactatcaaaactttctcaagtaatacatagttgtcagttatacaaacttactgaaccttgaccaaaggtcctcttttagtgctcatcttagagaaagaattaatgaaacaaagtgttctctgatttgtagcaaagatctgtgatggtggtgggaatggttctagaaaataatggtaataataaaaacttagagtatcaaagcagcaagtagatttgaaggaattgttacaatgcaattttgctttcccgccactttaaaatcaaggtgtagtactttatttactttaggaaaatgtttgctttttgtcataattccttattgcatatgagagtaaatgatctatagatgaagataataataaaatttagagagagaataaaaaagaaacactttcacagctgaaaggctgcttcccagttagctaactgggaggagttactgaaaaagtacattgaaaagcggctcaggggcaggtgaattggactcaccaggctctgacattcagagagatgggaatgagtcagctcactgtccagcacatctttattttatttctctttcttgttttatatcagaaatagatttcttggcattgttactgtgggtttctattaaggactgaaacaaaagtattaataatctgagagtatgtaaaaaaaaaattcattttctcctactatactctcataacacagaatattttggtgaccagagatcaccaaaatgtgtgtggtgtcaacgaaaagagtcaaactctctaaaatatttgaagagattttttctgagccaaatgtgagtgaacatggcctgtgacatagccctcaggaggtcctgagaacatgtgcccaaggtggtcagggtacagcttggttttatatattttagggaggcataagacatcaatcaaatacatttaagaaatacgttgatttggttcagaaaggcaggacaactcaaatggggggcttccaggctataggtaaatttaaacattttctggttgacaattagttgagtttgtctgaagacctgggattaatggaaaggactattcaggttaagatatgtttcttattggacctaaaactgtgcctggctcttagttgattactgcctggatctgggaaggaaggaaggaaaacaaagggggaaggggattctctatagaatgtggatttttcccataagagactttgtagggcaatttcaaggcatggcaaggaaatatactttggggctaatattttttccttgtctcataatgttatgccagagtcatattgaaaagcaagtcacaatatacaaggtcaaataaaacccatcctgatgagaacccatggtttgtagggcatgactccccagaacccttaggtaggaatttgggcaagataaaaaatcggaacttagtcctcggtgggaatctctccccacacaaattctccaacagattcttcagtgggacaccaactgggtgttctcaaattcaattcaattctgacaatctacctatctacctggaaatagcatcagataaccacaggtttacggctcattccaacaatactgtcccccacttcagatgccaactgcaagtaataggttgttacctatacttctagccagtcagctgtaaattggtgttcccacaacctccccctccggtttgataatttgagacagcttgcttacatgtaccagcttattagaaaggatattacaaaggacacagatgaagagatggatagggtaaggtatgtgggttggagttgcagagtttccatgacctctctgagtgcagcatcttcatgtgttcagctatccagaatctctcggattaagacattggccactggtgatcaaattaaccttgagtccctctccccttcctgaggttggagagtggggctgaagtgtctcaacctctaatcaactcttggtctttcctgtgaccatgccccatcctgaggctctccaggagcccccaggcatcagtcaactcattagcatacgaaagacacttatcactacagagattcgaaggattttaggaactgtgtcaagaaacggagacaaggtcaaatatgtatttcacaatatcaccagtagtttcactgggaggtaaaactcagtgtttactgtgggcctgagccatgctgaccctctaagaataacttagaggtaacgtgatcagatgtggggaattctggagaaacacctttcaccaccaagcccagacaagagatgcatacttttctagctgggatgcttacaaagcaacccactctaatacttcaaggtagagtgacactacattcatcatttttcattttttcctgttttttatgccatctactactaatgtcaatcaaattacgactgtgtttatagtggatgaattatggaccatctcacaccataaagttctgtttctctcatgttgagcttttcacctcccttcattccctccctacttccaggatcattcacatgtttatttctaaaaataaactttttttactgaactttttttcatactgtttaaaaagaatttatatttctcttcattcttacagataagattcaagtttaaactcaaataatgtaggaaatctttttttaaaaaattgttccctactgtgtctaggcgtgagaccaaaagtaattaagaccaggttttcatttgctgtgatttgtgtgagttctttttagaggttaggtgcaattttaatttttaaaagggggattattatgagaggagaaatcatactttatcatttgaaaatgatgccataacaggtgttagcagaaaaatcaaactgtaaaatattttaaagagatttattctgagccaatataagtgactgtggccccattgaaatgagcgagttccctgatccctctcacagagcttgcgacagggatgtggctcacctgttcagttgccccactgctcaaacccctagggggagaatacagacggtcaggtgcaaaggctggggcaagtgccttggccccttggccccttagccccgaggtagtgtctaggggtggggtgcctgcaaccccagtgttacaaagttctttcagctttgcagtccacggacagcttgagtgttaatcagctcaatggaccctctgccttatagcaaaggcagagggccagtgtgacagctttctgtatcccaagctcttgcccagtgtcctagaaaaaacagatcatacaggggctcgaaggatgagtgcaaggttttattgagtagtggaggtggctctcagcaagatggatggggagtgggaagtggggatggagtgggaaggtgaacttcctctgaagtcgggcagcccagtggctggactcttctccaacctcccccaggcaagctcctctcagcgtccagatgttcctcttccctctctctctctgccgcatcatttcaccatctgtctgctggtcagctggcttgctggtgtgctggtctgttggtctgctggtctgcttctggaacctcaggttcagagtttatatgagtgcacgatagggggtgttttgggccaaaaggtagctttttggacatgaaaacggaaatgcctgttcccatttagggctgcaggtcttcaggcttgagggtggggcctttgcccaggaactaccctcttctacccagtgtttccctgtctcctgtccatatcaccagtattcacagtctcaaggagtcttgagaaagtgtgcccaaggccgtcagattcagtttggttctgtatgtttcagggaggcaggaattacaggcaaagacataaatcagtacatggaaggtatacattggttcactctgaaaaggcaggatgtcttgaagtggggacttgcaggtcatagtttggttcagagattctttaatctgcagttggttaaaggaacaaaactgtacagaagcttcgagttagcaaaaagaaatatttaaattaagataaggatgctatgtcagagtcagccacaaaatgacctgtttagcaagattaatggcctataggtgtgacttaacccttgccttgcatggcctaaggtcttgtttataatttagtatcttattgcccaaagagtctatttagtcagtcttatgatctctactttaacattaatgctggtcacttgtgcctaaactccaaaggggaggtatatccaacctgccttcccattgtggccaggaacctttctctggagtccccttggccaagaaggggtccattcggttggtttgggaagctgaggattttgtttttagtttacacagggtcatatcagattgttttgatggggatgactaatggttttcttctctttctgtttcagccacagcagctatccttagcagagcaccctggagtctgcaaagtgttaatccaggcctaaagacaagtaagaatttcagtcctttttcttccttcaatgatattttccatgttttagtgtaattaagctactatcctttctctattttatttgggatggtagtaactggaatagtgactgagttgaaattttataggcaagcaaaacattttttaaggatttattttttaacttctgatatagtttggatgtttgtcccttccaaatctcatgtaatccccaatgttggaagtggagactgggaggagatgtttgggtcatgtgggcagattcctcatgaatggtttagcaccctcctctttgtgctgtcctcaccatgagtgagttctcatgagatctggttgtttaaaagtgtgtggcacctcccccttcaatctcttgctcccactctcgccctgtgagacacctgctccgcttcaccatgattataggcttcctgaggctttcaccagaagcagatgctaatacagcctgcagaactgtgagccatttaaatcatttttctttataaattacccagcctcaggtacttttttatagcaatgaaaacaaactaatacaacttctgtgcaaggctgcttttttttctattttttgcttgtgcttggaggttaagtaaggccaaattaatgaaggaggaaaaaagaggaaatgatacatcatggatcaacaattatttattgaatttaggaaactgcctctttttataaattctttttaaaattattttcattattatcttgaagtatttatctaaggtttacactggtagaaagttaaacttgtctctccaaccaaattgccttaagcttcaaaattatgccttattgtaagctctttcttaaccttaaaatgactttacacattccccgctggtcctttgacaatctcctcttcaaccacaagacagaaccccaccatcaactctgtggggaagcgtctccaaattctctagtcctgaacaacattctgccttctctgcttccatggaactttgtcctttacaacatgatagcgtttgcctcctgacattttagtgtgtgtgttagccctgcatatagaactcaccagattgtgtggactgcatgaatgaattaattctattgaactttaaggcaaagcctaaactttatgcttcttctaaatcccttacatctcctaaaaaaattctgatccatagtagtaggtacttgtttaattaaattttagggatggatatttttcatcagtggaagtatatgctagagtccatattatgcaataagggaagggaagacagtgtacctaaatcagttaagatattgctattcttgttgttattctagagtcacgaaatcataatttgaattttatgactaaattgcagaattaatttccaatgtgagattttaacattatttccttggaggtgaccaaaaaggagagctggtactgtttttaacaactgtcattcaattgtcagttgtgccagaccacaaatcctttatagccctcctgtttaagaagcatctgacatgttaagctgctccctaattaacacagaggttgtaaaagaagtggctgtttggttctgtttgggtttcccagccagtatattccaaagccttttttcactcaacagatgagttatgtgctttatattctgtaaggaaatgagaagtaatcagttgaaaatgtgttactaatggtacatgcttcacattgaaaccatcctcctgacacaaacataatactttgccctccactgtcccccaaagtggcagtaggatttctctaagtaattttctttacttatatgagtgcaggatagggggtgttttgggccaaaaggtagctttttggacatgaaaacggaaatgcctgttcccatttagggctgcaggtcttcaggcttgagggtggggcctttgcccaggaactaccctcttctacccagtgtttccctgtctcctgtccatatcaccagtattcacagtctcaaggagtcttgagaaagtgtgcccaaggccgtcagattcagtttggttctgtatgtcacagggtctaagaagcgtaaacattgtgtcttgttgaaatacagcctctaggtatggaggatgtgttgaacaacttcctaccagtcatttggcatatgttgatttcctgtcttcatgatacgtaagacgactagctaattatcattcatatgtggtaagtcacatagatactgacttcccctatctttccagctttttcttatcaaaagtcacctgctctctgtcccaggaacgactggctaaagtaacctatatcagtgtctgtaacagtgggcacctatcatagtgcacatgcttgaacatatcattgccttttatcatcacgagcctcacatccagatgtgacagactcaagtgctcacatcacctcactctgtcactgtatacattgttaccgtgtcacaaatatttaacagtctgctgtgtactcagtctttagctgtgtgccctgagggagacagagtaagatactgccttgacatcaaggagctcacattctccctaaagagataatttcacatgaaaagttagtgtttaatatgaaaagttagtgtttaacatgaaatgtcctgagaatatacaattataatttacacgtttcctgtgtgtacttttctaagttctcagactcaaaacaaagccccatggaagaaaaaatgaaataaaaaccctgtcaggacaaatcctagccagaactgaccaaacataaaaaataaatgccactgccctctccaagctacctttactttatacttgggtccaagaagcccaaacattgtgcctcattgaaatataacctctaggtatggaggatgtgttgaacaacttcctaccagtcagtgcagtgcagtgaccatttagcagcatctccctcctctctccttccaccccctgccccatctctccttccttgcatctatcttcccctgccaacaataattttcttatgttctaagtaaatatctttagtgctctccctactacctaaacattaaacttcaaacctttcccaagaccctgaacacccaccccagcttgtaagttcaggctacttaccattccccaggcacactgtattttccctcctctggtacactgctcatgtcatcgaatctatcttcctcccaccccatcctggattctgtaaatataaatcagtcctgcccacctttaagtttcagtcaaaacctgatactcatggcctgaagcaatccctcccttctccatgctggtctgagagaggtcatgatatttcagtagctctggagagacacatatggtcaaaccagaccagctaaaattaacccatgctatgcacaacctaaagaatcacctcttgctgtaacctctttcttctcttgctcaccaaaaactgtctgtcacatttgctaagtaagcccttagggctttgctgtgctggcaaaaggtcttaatccatgtgaatgtgcatttttgtgttagtgagcacatgctaacatgccttccacagattagtttcttaagaaacattttctgggggaaaaaagacctgtttttggttagtaaccccaaaaggacctttcagttcacatacgtggtagcagcatactccacttatgcaaaggtcagcccagggtaaatatgggcaaaaacacagacttaggataagaagaatgttaagggagtttacagtttaaagagatatccaaacaacttttttatattttaaagaagtaatgctataattttactacaaagaaaacttctttatatttctggggagaagaataggaagagttacaatctcctagagaaaagcaaaacatttttagtattcccaaataagacaggcacctcaactagggtgctgtggttgcacgttctttgtagtttttcaagaattttatttctctgtcatgattatttattggcagaagatttgttgggccaaacatgtaagactttcttaaacacatatagagaaaaaaattagatgattgcacatctttctgagggagatttttcccctatttttaaaagtcattgcttttcactgaatttgtcttgtattcctataaaagtgtaaattttgtgattgatagcatttttacctcaaaatgaaatgaatatccaactggagcaagttttattgactgcttattggagcataaattagtctaagttttcatgaaaataggcatttgaacatgagtattaatggctgagatcagaggcaagttttgaaaggattccaaaatattatcatattagataggcaagcaaatgaattgcttgaatgctagaagttcacaaacattcaaacaattgtgagttacattaacttcaataaaaacttttgcaggacaaaaatttaatatagtaaacttcatcttgcttgtccaggtccgtatacattcttagctggactcttgtcctagcttcctaatttttcttcctatctcctatttttccctattccaagccaccatactctgttcttgattaattcttcctgcctacctctgattcagtgattcatctgcccaatcatctatagtagctccaaactcttttctaaattatgaataaacttatctccctggcattcagaaaattcaacagcattcatcttacacacttttctagccttatctcccttttctcttatgtactcctatgtttatattccctgcagtcttgcttcattatatccatttacaatgacccttttaccagtaatttcctcttctttcctctcagtctgaaacaatccttcatagattttgtcctgtgagccatatttcaaatacaactttatccacaaagctttgcccagttcccacaagaggattctgcttttgctttagaattgtagcctttttttcctctctcgcaaggagagagagcgtagcaccgcagtttaagtactcagcctctggagtaagctttagtttaagacccagttctactgcttacttcctgtatgatcttctctaaattttatgatctctttgtcttttttttttcatctctaaaataaagatgctaatagtacctacctcataagatggttgtgagaattataagtgttgatatatttaaagtagttagaatagtatctggccctacagtaagcttacgtggtatttattgtattctcttatggctcttattttattccaatgtgtattaaattgaaccgtatgaaattgcccatgtcaactctatattggaccctaaaatcattatgtcttttggttcaaccaaatgtagtgctttttgcacccccccttaataaattgaactatctctaaagatagggacaatatcttacacatcattatatcctacagtacctgctacatacttgacatatgctgagtatttcacggatggttattgaattttgcacacacacacacacacacacactgcaaaaaataaacagaagccaagccctccccagtatcttaagtactctttggctaccagggagtttactccatgctgttcagcagtcatttatgaaaggagagtgataaagatatagaggaggagaattttatcttgtctattgctgagtataaatactatgcctttccgaaaagccttccacagaacctttccttcaggtcagggacctagtgtcatgggtcggtcttggataacgttgcaggacatatcagttcaactgccaagggaatcataaatagtcctactcctgcctgcggcccaccactgcctctctgctttcattcttttttatcagatattttcaacatcaagaacttattagctgataatttaactaaattaagtataacataagggaaatgtgtcctggcagagatggcatcttagagtgaatgcacagtctttattggttaccaaaaacaaaaaaaaaaaaacttgagctttggacaagcagtagagagcagatttgatactgggttctgacatggaagctgacattaaattattgacagtctacttgtttataaactattcaataaacaatttagtaagtaaacatagattcttgcaatcccttttaaggaaacagtgtttatgttggctctctcttgtacccaacctagtgctcagcctttcctgactcacataagcactaatctccagataacaccaagcaccctagggttattatttatcccccttccttgttctctgaaataagagaaaggcaggttaaattatgcactttatgtaagaagaaatggaggtacagagaaaacagcttaagtctcttaacagcccaagagagtgaagaagatattgccaatgcaatgagttgtatctgtccctaggtaagtaaaatattaattaaagcatacaactatattaataattaaaacaacagtctttacttatatggactttgcagtgacttttttccagcctgaaatactcagataatgactgccattagtttcacacgttagtgctttattatatactgctttgttttcacacaaaatcgttgagaggtaagaattttttgaaagaaatatttggtcttaacttttttatcccccttcaacttcaagcaattttctgagcaatgataagtggtaagtagatatttaccacttagtttacaagagacctgtttctctctgtgcattgacttaggcactattaatgaaacctttggaatgcaggtcccttctggttgtaaacatatactgaggtcttctatttcttttggaactcaaacaataagaaaatagttagaaatctgtttgtgggcataggtctctaaaagccttaatcttagaagtgagtaaaaaaaattttaggccagacgcggtggctcatgcctgtaatcccagcactttgggaggccgaggtgggcggatcacgaggtcaggagatggagaccatcatggctaacacagtgaaatcccgtctctactaaaaatacaaaaaattagccgggcgtggtggcgggcgcctgtagtcccagctacttgggaggctgaggcaggagaatggcgtgaacccgggaggcggagcttgcagtgagccgagatctcaccactggactccagcctgggcgacagagcgagaccccgtttcaaaaaaaaaaaaaaaaaaaaaaaattagagcctaagaaggatgattaagcatcttacttaaattttcagtatgcctatgtacactctatatactgacttctagcatggtttctttgccaaagcataacacacattttttaaagggataattcaagacaaacattctttcaccctgggtgaccccaatgggtggtgaacactttttagtaactcttgaaagttaaagcatccaacagttggttgtgacctttttggttgtgacctttgagttcttctagcttgtagcccactgatttgctgcttaattccacagcttcaaaaccaactctaatcactgctcccgagagagccctagcttctgcacacatgagtctctcaccaggaaaggatacctgaagtccagaaaagccctttgttcacactggctcctcctagtggggaacagtttttttaaataatgtacatttatgcactgggaaaatatcttgaatttattatttaggtgtaaccagactttaatacaacttaacctacacactgagaaagcagacatttacaaaaagatttatggctttgacaaagcgttcaaatgtagttaccattaaatagtagttcaagtaattgtgtgtctcatggcaaatacatgcaatataaggtaatatatatttaagccaaaaataacaagaggtgatcatttgctaaacaaagaacttattacttaggaaaaaatgttacacaactttcaaaggacttttgaaaatatagtatgatttataggaaatttatttgcatataattcacaatatctggtacaaggtaagctacctctgtgttttttttctttaggtcaacaaatatttaaaccaagggttggcaaacaggccctcagaccagatgcttgtttttgtaaataaagttttattggaccacacccatgcctgtttgtttcagattgtgtttactttagggctacagtggcagagtggagtagctaagacacagagcataggtccacaaacctaaaatatttactctctggccctctaaaaaaaagtatgccaaaccattctaaacagcaaagcaattaattcttttttttcaactcttattttagatttagggggtacacgtgcaggtttgttacatgggtcaattgcatgtctctgaggtttggtgtacaaataatccccttacccaggtattgagcatattacttgatgtttttcaactcacaccccgctcccaatcttcaccactctagtagtcccctgtgtctactgttgccatctttatacccatgtttatccagtgtttagctcctgcttataagtaagaacatatggtatttcgttttctgttcctgcgttaattcacttatgatgatgacttccacatacatccatgttgctgcaaaggacatgattttgttcttttttatggctgcatagcttttcatggtatacgtgtaccacattttctttatccagtccaccatcaatgcgcatctaggttgattttatgtttttgctgttatgaatagtcctgtgatgaatatatgagtgcgtgtgtcctttttgtagaatgatttatttttctttgggtatctacccagttatgggattgctaggttgaatggtagttctgttttaatttccttgagaaatctccacactgttttccacagtggctgaactaatttacattcccaccagcagctataatatggttgtttgtttgtttgtttgtttgagacggagtctcgctttgtcgcctgggctggagtgcagtggtgcgatttcggctcactgcactctccgcctcccaggttcaagcaatttgcctgcctcagcctcctgagtagctgggattacagtcgtgcaccaccacgcccggcaaattttttttatttttagtagagacgggatttcaccgtgttggtcaggctggtctcgaactcctgacctcgtgatctgcccccctcagcatcccaaatactatactgccccctcagtataatatagtattttaaggaactaatcatcaagtttgtactggttaccctcttttagtctcctgttatcttcaatttcataattggcattaatgacaatacagtgttcactttataaatttgcttcatagtaaactcttctgaaataaattacagtcatgcatcacttaacagtggggataggttctaagaaatgcataattaggtaatttcatcattgtgtaaacatgaagtgtactcacacaaacctggatggtacagtctgctgcacaccagcctttatgatatagtctattgttcctaggctacaaatctatacagcatgttactgtactgaatattctcagcaattgtaacacaatggtaagtatttatgtatctaaacatagaaaatgtacagtaaacatatagtattgtaatcgtatgggacgactatcatatatgcagtctgtcgttgaccaaaacatcattatacagcacaagactatagttgaaaattttaaattacatatgtgggttgcactgtatttctgtttgcagcattgatatatacatttaatggtttgtatgtttgtgcttgcattcataaatattaaactgttacagggagcatattttcttgtgtaaaaaaataaataatttttatttctaatgacatataaaattattatggttatgtttaaagaggcttgaagaggtattatggttatgtttgaagaggcaacggaaacgtcacctttgtcattgaccaaaacatcattgtgtggctcacgactgtaatagtgtaaagtaaggattcaatgtatcggctaatcaatgtggacatatcattcagtattattaaagatactccatccaatgaagactgaacacctgtaaatgcttggtgatggatggaaagggcaattatttgcagctggactgtctgagacgtgtcatcattattgcataatatttatttaatgaaggatcaatgcaccatacagctccagtttgagaacacacttgacattgtagtttgtagatcttttataaactaactgctatcactgaatttttgctgaagaataaagacaaaagattctctctttaggaaattgtgcactttaaagactcataaacctgaaacctcacagaatcataatagatgtattttcagagacaatttctgagtccttgacatattctcaaatgtcattcatgtcttcactgccgcaggttatctttttatttttatctgtcatggaaaagcagccttttttctttttttatctcctactatgccttaataaatagaatttaaaaccccgaatttgaattattgtgaaagccaatatttgtagcaaatccatctatgctctgtgttgtcagcacatatggttttgtgtacctgctaccatgaaactctgccagggttatcctcagagaaatggagagacacctgatgccatccttactctgacagaagtttttctttctgtgaattccaaaaacttttgaagttatgcatctcttgcattgaacttcagtggcttgtgtacacatggtatcttcctttctagattgtaagttctttgagggcagggactgaacctttctcatctttatatgctctgctcctccacccttggtttagccagggccttacaaaaagtagaagcttaaataatgtttattaggtgaatatcatactaagttccagaaattacctgagagcaattgaagaagggaagtgtggagggagaggtgttagcatagatttcatagtgtttgagtttggcagtttggcatccttttcctcaacactaatactgacacagataagtaacctaactgccttctcaaatctgagagcagtagatgcattttctcttttgggacttttctatctcatgtgggaaaagcaaacaagaaggtcctgcaaaagtcttgtgggtatttattcttatcagtggttgtggcaaactctcttactggtttcaattggtcccacaggctatgtgatgaggactttggggtttggggagctgggaaccatgagttgtctcttaagtatgacctaacatactgctaataccccacaagcttcaatttatccatctcgaaatggagatactaacatctatctcaaagggtcattgtgaggagcgagtaggaacatagaaaagttcctagcacaaagtagatatggaagatatggaataaggtgttaggtattttattatttttactgctgctgctgctgttactactactgctattattattactactcctggaagagtaggacttgcctgggacactgaccctacttaccccttcacctcattcaccaaaacttatctcctatataaattcatgtatatttttctggaaggataagaaaaatccttcatctaggtagcgtattttgtatttgaatagtttatgtttcaaatcccagagaaggcctatacagccaaatttggaaaaaaaataaatttaaaaataaatattcagtgtttcatatataataaaatacctaacatcttattccatatcatatatgtgtgtgtgtgtgtgtatcttttaattgccatgtatttctaccaaaaaatacaaaacttaattttgcgtcctgaaagaccctcgtttgagaatccctgcttttatgttctgctttagtccaggcaacagatagcttaggttgtcactttacaactggagcagcaggtagggctgagaggctcgccatactccaaattaccagtgccagtcccatggcaccaagacaggaaaggcaggcactcaaacagaaaggtagtgcaattaattgcttcaaattctttactcagggctgcccttagtcatgatcaaataaaatgtacacattgtttggcacttggtaaaatgttgtttcctttccttcctccttcccctgatagactctccttaggtacaaaaaagatgaggctgtacacagagctaaaagtgtacacctttgaaaaaggtgtctttttcaaagagcaccttcaccccttactggactaaactcaatccaaagctcttttctctaagctttataacacttactgcctggatgagtcatttgtcaataaatacagaatgtttgtataggtggggttcttgtatatatgtacgagcccctagagtctctaacttaaaatttatttttgctttagaagttcaggaataaggaggctttgatgatcaattttaacaaccgcaatatataatacagtaactaatggttaggtgtccaggctagcccagggcagcctgtgtgattcatgctgctggtgaaccatggctggctgggcgaactagatctggaattctgtggtgcctaagggagggaagggaatatttcccacactatctcatcctgccctcactatcgctacccccaatctctctctacattctaccccacctactttgctttttctgtgaaagaccagctggggcaaatattttggattaagtaaaatttgtcttgggtaacttccctaaaatttagtttttaattgaataatcttggttaatccatgagtaaataagcttgtagagtatagtcagcctcactgtgagaagctgacaaaccagaaaaccagaggaatatacaccaattccttcctgtcctgcaaacctctgcttcttgaggtttttaaagagtgggtgcctaattgattagtcattagttattgacaggaccaaagagatatgcctggctcctcttggaaaaaccaaaagactgagagggaaaagtacaccaaaaagatacctaaggaggcagactgctataaagaaaataattaggagaagaaatcatatgttttcagatgaaaagaatctgaggatgaaaaaagcagccttttcaggccgatgatggaaagatagaaactaaattcagaaggatcagaagacgattagaagggcaagaagtcatagaagaccaagatttcccaaattaccaaaagaaatcaagcccagtcttgttcaggctgcagaatgagaacgcccttctagtaagatccgtacaatgaatttcacaaatgttgatttctttctgtcctctttgagcccataatcacctccttctacttgcacaaccttgaccatcaccactacctataactaataaccagttcttatgttcccctcaaggcataacacaaaaatattttctttatgattactttctctacaaaaaagagggagagagagagaaacaagtcaggggacttcgttggtgagtgtagaccacagcaagaacctaaaatcctagtgggttgttagtatagacaggctgaaaccactatcctgaagtggtggttctaggtaggtatgcccatcagaatcatctgtggataagtattttcagtaaatacacatgcaggacctctacctcaaatgtactgaattgaacttcattgctggagcttaggcatttcatatttgtttcctaagctgctataacaaattaccacaaacttggtggcttaataagagaaatgtattctgtcacagttctggaggccagaagtccaaagtcaaggtatgaccaggattggttccttctggaggctctgaggaaattctgttccatgcctctctcctagattttggtgactgccagcaatctttggtgttctttgatttgcagaaacatcattccaatctctggttctgtcttcacttgaccttccctatgtctgcgattggtctcctttctgtctcttttaaggacacctatcactgaatgtagagcctatcctaatgcacaaggagctcaattataccttaattatatctgtaaagaccctttttccaactaaagtcatattcacaggtaccaaggtttaggacttgggcatatctttggaggatacagttcaacccattacacatatgcattgaagggaaaaattcacgccacaactgattatcctataaagaatgttggcttaacttaacgcatttaacgcaccatttctccagcacttaggaaatgctaggagatgcaaagctgaagctaaataggcttctttattgcagaacctctcagaggctctcatctgtttgtgtgcattataaatgtccaagagaaagaaaagaatcacaacatttcctggaaatacttgaccagggaacttcttttcaagggattacctgttaactacctcaatggacactaatgactaaaggaatacatgctgctggtgatcatggcacttccaaactatgctcaatggtgtgggcatgagtctaccacagtgtctaaacactaagattgttaatgtctacacgacctctccctggatatgagcacacatccttcatcaaatatccacagtggtttccctagaggatttgcatatgtgcatggatttttagatgtctagtctctactcttgtcttcagccatttttgtagagagaaattggcaaaatattagcatgaatggaagggaaaggtggccaagataatacattatgcctttttttttttccctgaaaacagcccagaatatctgaaaagggagaagtgacttaatcatttctattcccacaattctggtcctacaaaattgatatcagtatatgattcatccagagaagttcacagtggtatttttttaaaaaaaacttttagaggttaccagggcatctcactattttaaaatttaatacctcaagggaaataagcaactaccttgaatttttgcatgaattgcatttgagaataactgaatagttggtggaataaagttgtttttttaaaagtaggcatattctagttaataaatataaaagaaatggtaggattagaaaaatcactacattacaaactctaatgacataatagatttaagcaagatgatcagtgaatgataaaatatttaggtatgctgtcttctaggtgaatcaagctgacaataccttggacccacgttaatcttaccacatgatattatatgtctcctgatacttaaaataaatatcaaataaatcttgataattgttgaaaattgttgatgaacatatagttcacagcaccacccatgatgtattctttccatgagaattgatctgaatcaaagtaagcctctaggtctaactgccagtgtgtaggaaataccagggatagagaaacatttttaaagtctttaagattgcagtaagctgaaagaaattgtctggtttctgcaataacagcaacaaagttatgtaataagaagagagagggagaatcacggatttatacaaacttaagagacactgtgtgaatctagtttgtatcctgatcaaacaaattaactgtcaaaagatgtcttttgaaacatgatgggaaatttgagcataaactaagtattctacgatattcaggaatcattaccaatttgttagatatgatgttggtatgtttttttaaatgagaaagtttttagcttttagagatacatacctagatagttatgggtgaaagcatatcattaaaaaaaagatagtggaagtacacaaaacaggattgctatatgttgataattgttgaaccttggtgatgaacatataggaattaattaaaccatattttctatttttatgtttattttgcaaattccaaaataaaaatagaataatccctcatgaacagatggtctcaaatttcatcctcaagtaaacacaattcacattctcaggggaacccatgagaatattatgaagtatatgtctatctcatttcattatatatggaatcctaccattccttttgtctttattactagtggccagagttctatcttgaaaggtgggaaatgtccttatatgaacagattagtttagagaattattgtgagaaaaccagaaaatatttgagttctagctaactggatattgaatgagttgtgctgaagtatgtggtcataaagggttgataatgaaatacttgctttccagtggcaaggaaaaataaatgtcttagaatttacaaggtcattcttgaaatcaatcaacgtgggctgaagatctcattgcttctgttatctggcacgatggtatttgtttgtgcacagctctgttgatgtgagctatcaaatatttcttagagctgaaatcatctaatagcaaacattgctatgtcccaatggagattccaagactctttggccatggaacatttacattctatcccctttcatcactcctgaacaaacaaaaacaaaaaaaggaaagataaccaataggctttttatttaattgaaaaccaaagagagagagaggaaagaaccagttagttgccattttctaaatgcaggcttttgtttgtttctgccttctaattctttgctcttgaagctatagctttcaagcttgtgtatacaggcccagagagaacatttgaaatgtggccaccctacccatgtccatgccactcttcctgcctttctctctgcctacttctgctccaccatcccaggtcaggggcttggaggctgacagcattacaagtaatatagtcgttcaagctcatataaacaagatgaaatccaaataataaccaaaatgtattttatttcaaggactggactactcagttccctcagtttcgctgaccgatttctaggagccctaggctcagctcttggttgtctcagaactgaggagagtactcatttgcaccatatgcatctgcttgttagcctgtgctaccaaaattgattcattacttggccttctctgaaaagaaaaatgaaaacaaaaatgcactcttaaaaataattattaaaatacaaccaggaggtatgtgcctagacatggctcaccttctaccaaatcatactttatgattttccacaatattatcttctattcctcctgcccctaaggttccatggagcagagcaagttgaagaatgttaaggttttactaaacttttagaacagaggctttggggaagcaagagagaggtacactgaaaatgaagtgtctgtctctgcttctattaatgtcataggactagaagttgacctcatagctgattacaaatgaaccctgcaaattgaaccccagcacatgcctctcattatccattcttctctttgcaggatggggtccatgctcacatatcaagaaaatggtgggtttcagtctggctcactgggtgaggttttggcatgaaaactaatacgggttagtgtacatcacccataataaaagtaaaagcttttttttttatttacccaggtaaataagcaaaaggcagatctaaaatacattagagttaagttccatggggacagaaatgtctgctttgtttgttgttatacaattgacacctagaatggtggctggaccatagtgactacaaataaaatatttcttaagggaatgaatggttctgcaggatagatgttctctgcatttggataagtgatgatactatagactcagagcctagatagaaaatattgtcccactttcagttctgcaaactgacttgaggtgcttggtgacgtcctgcagcaagcaaaccaaatgaaggcatctctgagaccccatagtcaccaccagcatgctagcctcccattaccttgcccaccctagattttcaaattgggaatcactgtggtaccagactgggaatcgtgacttgcatactttctcatattggggcttgggattttgagatcttatttccttttttggcttcttgagatctgaaattgttgttcagagaaggatattaagacaatgactcttccattaccatgcatttctgttaccaacagaggaggtaagtgaatcacttaaaatgatacaattccatccacttcagtacaccataaacatatccttagctttgactataattatagtatgtgggtgatgccgctgagaaaatggtataattataacattatggttgagaattgtctgagtagaaaacactgagctgtactgtgcaaagtttaaggcggaattgtgggtcccttttcaatatgaataaaattgattagccaattgcaactgagagctttgtgcaatgatattaataatataaaaatcggccgggcgttgtggctcacacctgtaatcccagcactttgggaggccgaggcgggtggatcacgagatcaggaaatcgagaccatcctggctaacacagtgaaaccccttctctaataaaaataaaaaaatatagctgggcgtggtggcaggtgcctgtagtcccagctactctggaggctgaggcaggaaaatggcatgaacccgggaggcagagcttgcagtgagctgagatcctgccactgcactccagcctgggcgacagagcaagactgcgtctccaaaaaaaaaaaaaaaagtcaagggccaaagtaacaatgtaggaaaaatttgatgactttaatttcatttacttctaggagtcttacatgcaagcctaatgcagagtagagaagctcaccaacttgaaggaagcatgaatgaaattacaaggaaatctagcttagaaaaattaaccctgtagcttggtttttccactctttgctcttggcaaaaggatcttacgtatgtataccaaatgtctatttgaaaattttgtttctctgaatatagctttcttttctctttaacacactggtccagtggttctagattttatgctcccataaattaagtaagacagcattctatatcatgactgaggtgttaatgacattatgcagttgtcacattttgaaatataaacttaaatgcgagcttttcactgtgtgtaaagtttctctgtatttttttaaaaaatttttaaagaccagagattttcagcaacaagaaacataaagaagtaaaaagagcgtagaaaccctgccctagaggacctgctccaccacttaaaagccatgtacctcttgaagcctgtttcctttatttccaacacaggaatttttatatttacaccctaaccatcacatgggtcacatgtgataacaatgtgcaagtttcttacaagtgttctaggaatctgtaagtcttagagttctgaggtttattcccaaaggacaggaaattgtgggttacaccaaacagttaaacagggtggcagggaatccctgtcacgtacccaggcctttgggttattttctagggtgaggggacatggccagtagtacaaagagcatgtgaacgcatggatgtgggtgtgtgaggtcatgagtgggtgtgtatgtttatgtacaacacatgtattggaggataaaagggaaaataatttgtcttcctgacttcttctctattcctggcttttcttagattgttattcctctctaaacaaagcttcaaaacagaaacccctccccttctttattatatcggaaatctgggaattcagttatccttgtcttatcctactccctgttctgttctaaatatataataacaataagtaatagtactactactagtactagtagtagtagtagtagtagtggtggtggtagtaatggtagtaatagtaagaggatgaaaagatggaggaggtgaattggaaatagggaggtttcctgtagctgactgacagtttatatagcaaccgcctgcagatttaggttttttctgactgcgcttattttatagcaacctcaacaagctgtgacaacctgcaatatctttagcccttaagatactgtctcttaaacctgaccaatatttcttatttctcaaagagtaatgatagtcttttctgtctgataagttcaaaaggcacaactgattttcctaacattttcctcaaatgaagggagtatttgaaaaatggaactcaaatgaggagccacctcagaagcctaactggagcattcagactgcatcagacagacttggcttcagttctgacactgatacttactagctgtgggatttttggacaagcttctcatctgtaaacaagtataaatactacctactttataagctcgtatgaaaattcccacaaagtttgatgttagtttcctttctttttgtgctcagctctaaaaatatgcagtgtagtgagtcactaatatttcattaacataagggaaaactatatacccaacccaaaagctgagattcttcagaacattttttaaagaggttctaattaggaattttataaatggaatacagagtactttttaaataataataacaatgattaatttaagttactaaacaaaataccttaatgaatttgagaaaaataaactgaagataaatattaattattaaaagagaaaattattaaagtaataacatgcaagtcacttgatacttgcaaagtaacacagaattagacataaagccacatttaagaggcagcaaagccaaaatggctggccccctttaaaaggctcttggcaacagacatatggaaaactgtcatctcttccctgggcctttcttcctactctggataagcagcatccttcacacaaaagaacatccaggataactaagaaagagatgaaatgatttatcggaactagttaaaataattaaatcttaaaagcatgttctcctgggcatagagtggggtgatttctgcaaacattttgaaaataaagtacccctaaaacaaggatttggtttaactgctagaaaacaaggtgacaggttgagaaaactgaaaattttcttaaaatcttgtttacttgaatggtgagccagccacccagggaagaaaccagagctctttcctttaagaaatatagacttcagttggaagaaaaaattagtaggttttaaccttcaaccttctagtgaagtgagaatattgattgagcacctattattagaataaatttatcttaagtgacccagggaagggtcgtgggtgacgggaactgtcaagaaagaaaaaaaatatggctgtggatcttaagtacttaaaatctactgagggctcttgtctccattttccttagaccgtgatgttgctcaaagtcacataagagggcacataaatttactgaatagtattacagaaagcagcagtgacactgaaatgcttgcattatattcactatcccagtcatctgcagttgcctgagggatttgcaagcaaggacaggaaaatgctagtaccaaccagttctagataaagaatttatttgctccaaaaactttcactgtattaaattaaattagattggctggaattaaaaggtaataaggcccattttcttatgtaggtcatcaattaatttaactctaaagataattccaaaagaagaggtttaaaaattgtttgagtagtagtaacatcattggaatttatgtaaaacttcccaatgtactcacttttacagataacatatatatatatatatatatatatgtatgtctatgactgctggcataatgatcaaaatgatcagttttattactttgtaatcacatcaggcggcactgatggttgaaataaaatgtgttagatgagtgaatgcaaagataacatatagcaaatgaaagtctttgtctatgaagcacatgattgttataattgttgctgcccttttgggatcctgaaccagattccccaaataagtaggtaacacagaatttgtcttgagcactttttcaagcattgtaatccatgcattgaagtaggctttatcagcctacagctataaactccaaggtgattttaaagtctgaaggtttataggtcttcattaggataagctgggcttaccatataaatctatgaggactttgctagaaaaatagtggaattgttgaatagggaaaagagataatggtaacgggatttgcctgatgtcttcatcctagaaaaaaagatttctgcttgggcattaaggaccccagtgatgattctgggagactttcaggaatgctgacaaggctggagctactcaggatttgatgccaaagaagccacactgcacatgtgttcctctaaggtgtacttggttctcatctgagaggcaaaggctctacttctttttaattgtttggtcctaagttaccttcaaactccacctaaccacatctctaatcctgtgtatagcctttccaacatcttgtaaattccaaggggttgggggaacctttaggttccaaggctgagctaagttataaatgaataccctgtgcagtgttgagaatgaaacagaagctttggtgcgtggtagcccactgtgagtggggtttcaaaggagcagtccaggggccctacatgaataggcatatatgggccaagagacaggcttctctcagccataccatagtatactggaacaatgagaaatgggagaggacatacttcttaaagtgacacactgacctgttttcattctctcctctctctgcttctccatttccacttattgcccctattgcatctgtccagtaactgtttctttaacagttttccaaactgacattattaatccagaagatggatggtggttttttaattaaaagagaaagctgattttatttggtgagacttctgctatcatcttcagtgttatatcccaatatgagtactttttttaatgttctactaaatccaatagtatattcacctcactctcgagttaaactcttggctttaaaaaaattagccagaaaaacttcttaagaaaaaatacagtattttaaattctataaatgaactatatcttaaaatatttgggggcataattcaattgtatccattttactttaagatcatgcaaaaagggaaaggtatagatgctattttattgatatgctgctccatggatttcaaattcaacatcataagccaagatttgtgggaccagaggaatgttcaaaagtataatctgatacattatctgctgcaggaattaagtaaaatattgcatacatctcacttcctataccaaatagagagaatgaaagtactagattttgtattacagatagtttagacaactatagggaattctgaactttcaaacttttatatcctaaactcaagatttgggccttgaaaaataaaactgataaaactgctacagtgtagatttttaaaattacattcatgtggtgaagttgacactttctgttggtatggctagaagtcagatagatgcttaatttgaaagaccatgtttttatttcttctctttttcttaccctatgatttcattgacctgaagtggcttttagtgccattcaattcacacagaagccaaaattggttactgtgttaagaagaaaccaagatgttttatttagtttatgaaacactagcaaaattactatttgatgcaaaactgtgaggaagttttgtagtcattgaaaggagcaagaatatagactgcttgcagttccagtgtcgagacattcattatcagatttaccacttgaaaatattatcaagatagtatttatattgtgtttaccaggtaaactaagcactttagttctgagcactttacatattttaaatcattaatagtgctgtaacaagcctctgaggtaggtactgttatccctctttaacagataaagagactgaggcacaaggaagagaagtgacttgctgaaatcacacacagctgaatgtggaccctgattcaaatccacacatcctgactcaagcatccttgctctgtactactgtgctacagtgcctctttacatcctcctgatgtagaaatcttcttctagaataatgagaagcagtgtgaactttgaagtaggacttcctgggcatggtgctttccatctctgggccaaagttttctcatctttacaaaaggattacgatcaacccccatctcatactgtggttaggagaattgagcaagaccatatactaaaagatgtcagaacagggcctgacagatcatagtgcccaataaacattggctcttgttatcatcataaatatgttaaaatgagctttagtatgtggataatagtagcagaatttcctgaatgagacatgttaaacatttattaagcaggcactttttggagtttatcttataataattcagtaaggttactcttgtcatccctatttcactgaatttgaggaatctcaggctgcaagataacgtattagttttctagaatcaaataagcaaggattcaaactcaggatatattgaccccaaaacctcagatctttctgccatccctatcttgttctaaaccccaggtttgctcatccgggccctagtcattgatcaaaaagcaccaatacaaatcagagtagagaaagtcatattgagcttgtgaggttgtattatgggcatggtaacaaatgtaattcagctgtattggcacagtgcataacaaccacacttaatttctgtcctaagacctgtctgagcccataaataaagttacattaataattacggaatggtaagggaccactcagaaaatcttggttgatataggaagtggcatctgtggcttctaattgagagatattgcttcttgaatcagtgctagaccattgctctagggggatattaagccttctctgtccatggaagatgtgaaattcaacagctgacctgactgcttgtcgctgttgatgatcctataaaatttcctctaagatacgaactctgtgttctagtccaaatcaagtgaatatttcctgttggttgacctacaacttcaagggtatgaggtcataagtttaaaaagattccttttctccccagtgttgtaagagttattttagttctatcaaatgctcccagtgagtactgcatatttcctttttgccagatacattagctattcactcttttttcctatctcttctatgcttttattttttccctcatctgtttaaccaatggtaccctgaattttagaaccagacaggtagtaggacaaggcaggtgaaaatgcacaggttgtaaatttcagaatgcacattcaaattccatcgttgtctcttactaactgaatgaatgtaggtaagatgctttacctctcagagtcttacttaccccatctataaaatgagaataatacaaactgtcttctgtggttttcttgagcattaaacgtctctatttatggaacatagtttcacatagtaactgattctgtaccaatgccctgccccccatgtaggcaaatgcatgtcccgaaagacccaaaacaagttgtccctcttttcaagatgaagatttgtaatctctccttaaacttatccagttctggtgtttaatttcctttataagccagaagttgttttacgtctcaccaaatcttataacatgaatattacactgtcttccaaatgtgagcctctaattaccttaggccaatagcagagcctctgatcttgtcttttctccttttccgcttaccagacagcacattctgcctgagagttgagacccaaaaagatataaatcaactagggggcaaaaatggagtttcctaagcttgtcccagagtttgactcagtagcctgaggtggagttcaggggcttgatgttaaaaacaagctaccccagtggttttgctgcaggtggaccagactcccaagaccacattttgcaagcactggcatttaggaagagcacgtacctactctagcagagtttatgcagactatgattgcagcctagtttgtgcagactattgattgcagccacttggcaaggctctataagaaaaagcgagccaacatgtaagtaaattatcatggccttgaaactcctcatctgaaagggtttcctctcatcccctcatccccttgtgtctgcccctgaatgccagactatcttctccagccccaagtcaacctctcatttttaagccattcctcattctcctatatagtccaaaatagcgaatacatttttaggaattctcttgctttatggacgttcatccaaaaatatttcattatgagaataagtgcttagcttatcctgtagtgtctttctgctctaatatttgggcccttcctttccacatagttgcattttctttgacgggcagatgctgctcctttaatatttttcacacctttgtgcttctaacagagcaattatttcaggatgagggcacttggagagctgtaagaggataaggagcccagggctctgccttggatttgtgtacctaaatgttacctaattagataaacctgaggaagatgtggaagcaaagtagaatggaacagaaagtgtttgaataataagaatttggacattgctgctccgtggtgacattggcagactctaagcctcttgcctcattttattcattcatgtatgacggggttatgctcagtcataagtcactaaaatttgtattctacatcccattagtaaagtaatttttgaacacatgatacatatgtttacatatttgtaagttatatatatgtacaaggttctaatatattctgttcattgtcaaacataaaatatatataaatttggtttaatataaaatataaaattggcattagtagacactgtctaccgaaatgagacactgtctcatttctgaaaaaagcacaatgtatactaagttaaaggttcattcttaacagcagtaggagtagatctttatttcaaatagtctttgggataatttcctattttggaagacagcttatcagatttggttagagttgatgaaagcttattctagggttaagaaaagtattagcccagccattttcttattgttgatttgggcttgcataattagttttaccttcagtatgaagtttctttacatgaatctttttaactcacttatttgttatacaattattagttaaatcaattttaaatcagtataatctatccacaaaatcagtcatacagaacctgcaaaaaacatgttctaacatgttacatgaagaggtaactaaagatactacaaacaacccctctgaacggtaacactcccactcttcctgcaaaattcctctcatagcaaatgcaacatgtgactcagacacaggctgactgaaggctttatgcaactcttacatgctcaatattagaaaactttcatttgtttcctattttatataaacaacacatataaataaacattttagtatcttctcattacccagtggattgtcttgcatggtccattttgaagacagtaaactgtagcctctatttttatttaatttcaaatacctgtttgccaatattcacagccagctcttgttaatgttcttttctgtcctgtgaatcctgatgtcgtatcttgcaacatcacctctaaagcctatctttgcactcctgtccatcccccattctctattattatgctgcctctgatggccagagaaaaaaatcttgaaaatatatattgtattgccctacctggcgaggaatcagcagttatacaattcaaagttgcagcaattcaccacattgtttagcaccctactatgtgtaaggaggaagcttgatttaaaaaatatatacaatcatgccttcttcaagaatgttttggagcatgcaagagcttaatgctcatggacatttactttattccagcaaatttagacccaatctctgtgtagtttcattttgttttccatttcctgattaactgactatatatctagctacttatttgctgccatctagtgtaataaagtatgttgattatacaaggaattttgagcccattatgtagttgaatatcagtactcaaaatgattctttttttctggtttcttataagtttacaaaatgcctagtcagggacctttcttatcactgtaaccctgaacatggtcttaatcttgtgtcatagaatctagggctcaggatcaaccttcgttcattttctataaatgtgacatttggaaactgggtaggggcttagcagttggtggatatgaagtaaatatataagagtaatcattaagagatcatctcagtttagtgaccatgattttttcctcatggaggcagcaaaacacagcatggattcttaccagtagtgtgaccatgggcaatttatttctctcttggaggcatcattttcttcatatctaaaatgaaatggtaggtccaggtgactgttaaggtctcttctagctctaagagtctgtgtctacatataaatgattttctctgccaaagtagtgtttttagagtcctttttaatgccagaaatgaatacggcttctctagttcttctaagtggccatctatcctttggtgatggttagaagtaagcagagatcctggctagaaagagagagaggaaaatgtggaccatgattttattccttttattcttgagagttgtccaatgggatattgtccactagtggataagtagatacttgccaatatgcacctgacctcttctcttcactcataatgggaatttagaagtataatacctgttataatcaacttcctaatctctatcccttttttgtcactctatttcctactgtaacttctctatgaagtactataagtctacagtaacatactggtgtttccctttccttatgaagttttatatagctactccagtatatcctaaaatgttcctttttcttgcttttatagtggagtcttgcttgttggccaggctggcctcaaactcctgagctcaagtgatcctcccacctaatagtagctgggtattcttctgagtaggtggtcctaaaatgttttattttcagcttatttcataggtataagtcttattttcccaaccaggctgaaaacttttcagaatcaggacttgtctttagtttctcattttttatgaggggatgtggcattattgcttagggaattcagatatttctgataataaagatgcttttctgtttgttcatataaattagggtaaaagaggaagtacaaaactatctcaaatcaagtacaggactcttaattattactagctatctaacagctcatagaaaccgataagtttctgaacctaatgccaaaaaaaagcaaccttaccataaaaagaaaatccaaataaaactgaaagaggcagtgggcagtgctacctatgggaagaaaactttgaagtgggaaaaatctggattcacatcccagctttgctacttattacctttgtgttttggctaaaaattatctaactttcctgaagttaagtttccttctctgtaaaatgagggttataataatatatacagcatactccacagaagagttgtgaagatggaatgagaaagcaaatggcaaaaacttagcacaaagtaggagctcaatcaatcatggttaaaaagaacttttatccattgttatttttgcttatatacagtaagaattatccaatgcaaatgtaatcagagcatctgcaattgagctttataaagtgaattataattctcataccatagtggttctcatcaagggtgatttttttccccccaggggacatttggcaatgtctagagacattttacttgtcacactggaaaagagggggtgctactggcatctagtaggtagagagtaggaatgatgataagcattctctaatgcacaggacagcattccacagcaacaaatgatctgatccaaaataccaatagtgtggaagttgagaaaccctaccataaagcctagggagtccattacttctgacctaaatttgttttatatttaagagtggatgtggattaaaagtagcttccattttggtaggttatgaagagagttgtctaatctgtgctttagattctaattttgaggcatatttttaggctaaggcattgcaatatataaggctttctaagtttcagacattttcttggaggtcaacaaatgaaggcttggggatctattaacccactagagtagtgtaataatggtggtggttgtttattgaagactaaccaagtgccaagtactctataataatctgatttatttttcagcaactgtataagcaggtattttgctctcattttacacaggggaaaactggagcttagagaacttatgtaacattactagcaagttgcacagctgggattcaaactgaaatccagctagcttcaaagactgtgttctttctgctgctgcatactacccctacctaccaaggctctgagattagaaagcaggatgggtgtgttttaaaggaaataaggtaggaaagttttcaaatattagaaactctgcacaagaagattaggtcaagtttcccactgaggggcccttgagtatctatgaactcgatgaaaactctgagcttctcaggaaggtagaccaaagggaaaggattcatcaaaatggatgttagcactatgccatgtgtattactccatcctcacacggccaaaaggacatacctgagactgggtaatttgtaaggaaaaagaggtttaaaaaagttctcttcgatggccaaataggaacagctccggtctacagctcccagcgtgagcgacacagaagacgggtgatttctgcatttccatctgagctactgcattcatctcactagggagtgccagacagtgggcccgggacagtgggtgcagcacactttgcaggagccgaagcagggtgaggcattgcctcactcaggaagcgcaaggggacagggagttccctttccgagtcaaagaaaggggtgacagatggcacctggaaaatcgggtcactcccaccctaatactgcgcttttctgacgggcttaaaaaacggcgcaccaggagattatatcccgcacctggctcggagggtcctacgcccacggagtctcgctgattgctagcacagcagtctgagatcaaactgcaaggtggcagcaaggctgggggaggggcgccaggcattgcccaggtttgcttaggtaaacaaagcaggcgggaatctcgaactgggtggagcccacaacagctcaaggaggcctgcctgcctctgtagactccacctctgggggcagggtacagacaaacaaaaagacagcagtaacctctgcagacttaaatgtccctgtctgacagctttgaagagagcagtggttctcccagcatgcagctggagatctgagaacaggcagactgcctcctcaagtgggtccctgacccctgacccctgagcagcctaactgggagacacccctcagtaggggcagactgacacctcacacggccaggtactcctctgagacaaaacttccagaggaacgatcaggcagcagcattcaaggttcatgaaaatccgctgttctgcagccaccgctgctggtacccaggaaaacagggtctggagtggacctctagcaaactccaacagacctgcagctgagggtcctgtctgttagaaggaaaactaacaaacagaaaggacatccacaccaaaaacccatctgtacatcaccatcatcaaagaccaaaagtagataaaaccacaaagatggggaaaaaacagagcagaaaaactggaaactctgaaaagcagagcacctctcctcctccaaaggaacgcagttcctcaccagcaacggaacaaagctggacggagaatgactttgacgagctgagagaagacttcagacgatcaaattactccgagctacaggaggaaattgaaaccaaaggcaaagaagttgaaaactctgaaaaaaatttagaagaatgtataactagaataaccaatacagagaagtgcttaaaggagctgatggagctgaaaaccaaggctcaagaactacatgaagaatgcagaagcctcaggagccgatgcgatcagctggtagaaatggtatcagtgatggaatatgaaatgaatgaaatgaagtgagaagggaagtttagagaaaaaagaataaaaagaaacaaagcctccaagaaatatgggactatgtgaaaagaccaaatctatgtctgattggtgtacctgaaattgacggggagaatggaaccaagttggaaaacactctgcaggatattatccaggagaacttccccaatctagcaaggcaggccaacattcagattcaggaaatacaaagaacgccacaaagatattcctcgagaagagcagctccaagacacataattgtcagattcaccaaagttgaaacgaaggaaaaaatgttcagggcagccagagagaaaggtcgggttacccagaaagggaagcccatcagtctaacagctaatctcttggcagaaactctacaagccagaagagagtgggggccaatattcaacattcttaaagaaaagaattttcaacccagaatttcatatccagccaaactaagcttcataagtgaaggggaaataaaatactttacagacaagcaaatgctgagagattttgtcaccaccaggcctgccctacaagagctcctgaaggaagcactaaacatggaaaggaacaacaggtaccagccactgcaaaatcatgccaaattgtaaagaccatcaaggctaggaagaaactgcatcaactaacgagtaaaataaccagctaacatcataatgacaggatcaaattcacacataacaatattaactttaaatgtaaatggactaaatgctccaattaaaagacacagactggcaaattggataaagagtcaagaaccatcagtgtgctgtattcaggaaacccatctcacgtgcagagacacacacaggctcaaaacaaaaggatggaggaagatctaccaagcaaatggaaaacaaaaaaagtcaggggttgcaatcctcgtctctgataaaacagactttaaaccaacaaagatcaaaagagacaaagaaggccattacataatggtaaagggatcaattcaacaagaagagctaactatcctaaatatatatgcacccaatacaggagcatccagattcataaagcaagtcctgagtgacctacaaacagacttagactcccacacaataataatgggagactttaacagcccactgtcaacattagacagatcaacgggacagaaagttaacaaggatacccaggaattgaactcagctctgcaccaagcggacttaatagacatctacagaactctccatcacaaatcaacagaatatacatttttttcagcaccacaccacacctattccaaaattgaccacgtggttcgaagcaaagctctcctcagcaaatggaaaaaaacagaaattataacaaactgtctctcagaccacagtgcaatcaaactagaactcaggattaggaaacccactcaaaaccactcaactacatggaaactgaacaacctggtcctgaatgactactgggtacataacaaaatgaaggcagaaataaagatgttctttgaaaccaacaagaacaaagacacaacataccagaatctctgggacgcattcaaagcagtgtgtagagggaaatttatagcactaaatgcccacaagagaaagcaggaaagatccaaaattgacaccctaacatcacaattaaaagaactagaaaagcaagagcaaacacattcaaaagctaggagaaggcaagaaataactaagatcagagcagaactgaaggaaatagagacacaaaaaacccttcaaataattaatgaatccaggagctggtttttggaaaggatcaacaaaattgatagaccactagcaagactaataaagaagaaaagagagtagaaaaataaaaaatgataaagaggatatcaccactgatcccacagaaatgcaaactaccatcagagaatactacaaacacctctacacaaataaactagaaaatctagaagaaatggataaattcctcaacacatacaccctcccaagactaaaccaggaagagttgaatctctgaatagaccaataacaggctctgaaattgtggctataatcaatagcttaccaaccaaaaagagtccaggcccagatggattcacagccgaattctaccagaggtacaaggaggaactggtaccattccttctgaaaccattccaatcaatagaaaaagaaggaatcctctctaactcattttatgaggccagcatcatcctgataccaaagcctggcagagacacaaccaaaaaagagaattttaggccaatatccttgatgaacattgatgcaaaaatcctcagtaaaatactagcaaaccgaatccagcagcacatcaaaaagcttatccaccatgatcaagtgggcttcatccctgggatgcaaggctggttcaatatttgcaaatcaataaatgtaatccagcatataaacagaaccaaagacaaaaaccacatgattatctcaatagatgcagaaaagttctttgacaaaattcaacaacacttcatgctaaaaactctcaataaattaggtattgatgggacatatctcaaaataataagagctatatatgacaaacccacagccaatatcatactgaatgggcaaaaactggaagcattccctttgaaaactggcacaagacagggatgacctctctcaccactcctattcaacatagtgttggaagttctggccagggcaattacgcaggagaaggaaataaagagtattcaattaggaaaagaggaagtcaacttgtccctgtttgcagatgacatgattgtatatctagaaaaccccattgtctcagcccaaaatctccttaagctgataaacaacttcagcaaagtctcaggatacaaaatcaatgtgcaaaaatcacaagcattcttatacaccaataacagacaaacagagccaaatcatgagtgaactcccattcacaattgcttcaaagagaataaaataactaggaatccaacttacaagggacatgaaggacctcttcaaggagaactacaaaccactgctcaatgaaataaaagaggatacaaagaaatggaagaacattccatgctcatggataggaagaatcaatattgtgaaaatggccatactgtccaaggtaatttatagattcaatgccatccccatcaagctaccaatgactttcttcacagaattggaaaaaactaccttaaagttcatatggaaccaaaaaagagcctgcatcgccaagtcaatcctaagccaaaagagcaaagctggaggcatcacactacctgacttcaaacaatactacaaggctacagtaaccaaaacagcatggtactggtaccaaagcagagatatagatcaatggaacagaacagagccctcagaaataacactgcatgtctacaactatctgatctttgacaaacctgagaaaaacaagcaatgggaaaaggattccctatttaataaatggtgctgggaaaactggctagccatatgtagaaagctgaaactggatcccttccttacaccttatacaaaaattaattcaagatggagtaaagacttaaatgttagacctaaaaccataaaaaccctagaagaaaacctaggcattatcattcaggacataggcatgggcaaggacttcatgtctaaaacaccaaaagcaatggcaacaaaagcaaaaattgacaaatggggtctaattaaactaaagagcttctgcacagcaaaagaaactaccatcagagtgaacaggcagcctacaaaatgggagaaaattttcgcaacctactcatctgacaaagggataatatccagaatctacaatgaactcaaacaaatctacaggaaaaaaacaaacaacaccatcaaaaagtgggcaaaggacatgaacagacacttctcaaaagaagacatttatgcagccaaaaaacacatgaaaaaatgctcaccatcactggctatcagagaaatgcaaatcaaaaccacaatgagataccatctcacaccagttgttagaatggcgatcattaaaaagtcaggaaacaacaggtgctggataggatgtggagaaataggaacacttttacactgttggtgggactgtaaactagttcaaccattgtggaagtcagtgtggcgattcctcagggatctagaactagaaataccatttgacccagccatcccattactgggtatatacccaaatgactgtaaatcatgctgctataaagacacatgcacactatgtttattgcggcactattcacaatagcaaagacttggaaccaacccgaatgtccaacaatgatagactggattaagaaaatgtggcacatatacaccacggaatactatgcagccataaaaatgatgagttcatgtcctttgtagggacatggatgaaattggaaatcatcattctgagtaaactatcgcaagaacaaaaaaccaaacaccgcatattctcactcataggtgggaattgaacaatgagaacacatggacacaggaaggggaacatcacactctggggactgttgtgggggtggaggagggggaagggatagctttaggagatatacctaatgctaaatgacgagttaatgggtgcagcacaccagcatgccacatgtatacacatgtgactaacctgcacattgtgcacatgtaccctgaaacttaaagtataataataataaaagaaaaaaaaagaaaaagaggtttaatggactcacagttccacatggctggtgaggcctcacagtcatggtagagggtgaatgaggagcaaaagcatgtcttgcatggcggcagaaaagaaagcatgtgcaggggaactgccctttataaaaccatcagatctcatgagacttattcactgtcatgagaacagcacaagaaaaacctgcccccatgattcaattaccttccaccagctccctctcatgacacatgcggattatgggaggtgcaattcaagatgtgatttgtatggggacacagccaaaccatatcaccatgacatacaatttgccgattcagcaacagttttcaggtcttctatttttaagcctaatgcaatatattttatgaattcttcctatttatgtttttccttttaaataagttctactatcttaactatcactttcaaatataatgcaagctacatatgccattttaaattttttagtagttacatttaaaaagagggtgaaattaattttaacaaagtaggttatttatcccaatatatccaaactattatcattttgacatgtagtgaagctaataaaagcattcattgttaatgatctatctcttacattattttttcctaataaatcttcagaatctgggtgtgcattttaactttccagcacatctcaactgggatgtgaaattttcagcaattaaagtgaaatatagccctatcaaaactattaatgttgcatttaggaaaaagatatttttcactctttttatttttaaatttgagtttaaattaattaaaatggaataaaatttaaaattcaattctctgtcacactagccacatttcaagtgctcaatacctacgaaagacccatggctaccatattggacagcacagatctaagctcttattgctcagaatgtggtccccagagcagaatcaacagcatctgtgaacttatcaaaagtgcagtatttcagttcacacctactgaatctgcattttaacacaatccccaggtgatgcttgttcacatgaaagttgtgtctctctaaatcgcagatcttttcaacaaagagcccagaaaaagcacatgaatcaataactgtgaggaataaggaaacttgccacaggagaatggtgccagggttggcattaatgatgtgctctggtgaaaagtcgtaggtttcccacaaaggcaaccatggctattctattgtttgaactgacacagagccattctagagcttggagttggctctgctcccagaatctacatcaaagaatctaacactaacttccatgactaccacaattaaggcagctgcacaccccaccactatatatatttgaaattgcaactttagaacccctgtaacacagccgtgagcatgtttctgctatacacaagtggaatttaaggtcgaacctccctgggagaccccaggaagatcacccacaagagtggcttttgttgtctgcctcactgtcatcctctgagagctaacacagacacagtcaacatcctcttatatggaggttggcccagatgcccctggggattcaatgtattctgcttcacctcactaatccttatttggtttgtttttcacagaactcagtatttgatgggcctttcaatattttcctttaaggaattcattgtactaatataacatagaagctcattgttctaataagtggtccccaatgttggctgcacattagaatcacctggggcattttgaaaaataccaatgcccaggcatcaccccaatctaattaaattaaacctgtggaaggtattttgttaaagatccccaagtgattacaatgtgcagccagagttgaaatccactggtccaattagaaggaggccttagctagcggtcaggtgcccaaggaaaggcatctcaagttttaatgcgcatacagatagcttgggatttgttaaaatgcagattctgatccagtaggtatgggtggaaataaacccatgtttgtgtacagatgtttctcttgtggtatgtggttggtaatcatcctcagtatgtttccatttccggcaaactgggttgagttgatgaccctattcttactcctccctgaaacctttgtctctccctcaggctcccagttctcattaatcactactttctgtgatattctgaagcaattattatctttaactgccttttttcattagctacttctctatctgcttatgtacgtgagttatttcctctactggattacgatcttcaaggtagatccaaatatcatgtcatttttataattctcactgcacctaaagagtgccttacacacaaatgccacttgttgattaattgaaacagggaatagctgatgtgatcatctcaaaaaatatccaaaagacttaaaaatgcaagatatttttctttgttggacagaaaaagaaagtttagataggcaagggggtaggagatattgaggctttcaatttttatttcactcggtacatatttaaattttgaagaattattttgtaatttagtgattttaattatttgttgggaatagggcactattgacattttggactagatcattctttgttgtggctgtcatcctgtgcattgtaatatgtttcacagcatccctggcctcaacccactagatgccagtatcaccctttaccccagtcttgagaaccaaaaatgtctccagtcattgcaaaatgtctcctgggaaactcattcatggttgagaacccttagtttagaaaaatggaagtgtgacacagctgtcttaccgcactaatatagacctgaaaaaaataaaaaattaaaaacatgcacataagagaatgacaagctatgttctgagcaatatgtgtatatataaatattaatataaaaatgttctctgttcctgcgttttggaggccatgtgcttgtagaccatatttatctttgtatttgtcatcttggtcattctctttataaaaatagaggtatattgcatgccaatgctcctcagcttatgaggttacatcccaataagcctgttgtaaatttaaaaaatcataagttagaaatgtcaaaacttgaaaatgcatttaataccctgataaacacatcataaagttgaaaaatcctaagtcaatccatcatgagtcaggaactatttgtatatgaaacatttttaaaatctgaacatagacttaggaattttaatatgtagtggtagtaattccaccaagcaagagaatacatagagcaaaaatcattaagaaacagtgactgagatgattctcattctcaggaaactggtccagcccctttacataaaatattctgttcagtgtgctgtgatccttggactgaatatactgttttagcaagcagagttgttaagctaaagcctgcacatcaacaggtgttcaatgtctgctgaataaatgaagaatgaatgaatattaactgcacctctaaaccctaaaattaaaaagctttaatgtgctcatcacaaaagaccctattttgttgcatttgaaatttcaagcttcaaaaatgaaattacatgcaaaagtatattatcatcaatgagaataaatggcctcaacaaaattacaagatagaaaacaaagtttcatttgtcagttggtttcttctggcaatagaaggctccccttagacttcattagcttcagatatttcagtgacagaaatttaatgttggcaaagcattgctatactttcaggcttggattggaatgccccacatttactttttcctaccattcctggctaaaaacttgaatgtgagaaccagacacaaggctctagtggtagcaagcagaatgtctcctaagctccaaggggaaaaaatgatataagtcagtggttcccaaattaaccatcaaatgctacccattaaaatcactggggaacttttaaaaattaaatgcccaactaacaacaaactgtatgaaaaagaaatttagaaaacaatcctatttttaaaagcagcaaaaaagtaaaatacttaggagtaaatttaaccaaggaagggaaatatctgtttactgaaaactatgaaatgttgatgaaagaaattgaagatggtaaaaataaatgaaaagataaatatgtatggattggaagaattaatattgttaagagatctatactacccaaagcaatctatagattcaatgcaatcctatcaaaattccaaagtcattctttatagcagtagaaaaaaatcataaaattcatatggaaccacaaaagactctgaatagccaaagcaatcttgaccaaaaagagcaatgctggaagcatcacattatcagatttcaaaatatattacaaagctacaatattcaaaatagcatgctactggcattaaaacagatctatcaactactgaaacagaatagtgagcccagaaataaacccacacatctatgatcaattgattttcaacaaagataccaagaacacacaatggggaaagacagtgtcttcaataaatggtgctgagaaaactggaaatccacatgctgaagaatgaaattagatccttatctcatcccttatacaagaatcaactcaaaatagattaaagacttaaacataagccctgaaactataaaactaatgcagaaaatatagggggaaatctacatgatattaatctaggcagaagtttcatggatatgacctcaaaagcacagacaacaaaagcaaaaatagacaaatggcattgcatcagactaaaaaacttctgtacagcagatgaagcaacaaatagagtgaagagacaacctacagattaggagaaaatatttgcaaatcatatattagataaggggttaatattccaaaaggtacaaggaaatcaaactactcaataacaagaaagccaattaccctattaaaatatagggatagcattgggagatacacctaatgctagatgacgagttagtgggtgcagtgcaccagcatggcacatgtatacatatgtaactaacctgcacaaggtgcacatgtaccctaaaacttaaagtataataataattttttttaaaaaaaagcaaaaattaaaaaaaaaaaaaaaatatatatatatatataggcaacaaacttaaatagacatttctcaaaagaagcaagtatcaccctgatttaaaacctggcaaagacacaatgagaaaacaaactacaggccaacatctctgatgaacatagacacaaaaatccttgacaaaatactagcaaactgaatacagcagcacatcaaaaagttaatttgccatgataaactagtgtgttagggtgttctagcatgctattaaaaaatacccaagactgagtaatttataaagaacaaaggcttaatttgttcatggttctgcagcctgtacaagcatggtgccagcacctggccagcttctggggaagcctcatgaaatttttattcatggcagaaggtgaaacaggaacaggcacatcacacaggggaagcaggagtaagagagagtgtgagggaggtgccacacacttaaacaatcaggtctcacaagtactcactcactactgcaaggacagcaccaagccataagggcccacccccatgattcaaacacctcccaccaagacccacctccaacattgggcattatatgtcaacatgagatttgaacagatacaaatattcaaactatatcaagtaggcttccttcttgggattcaaggttggttcaacatacacagatcaataaatctgactcaccacataaacagaattataaacaaaaaccacatgatttcaataggtgtgggaaaagcttttgataaaatccaacctcccttcatgttaaaaaaaaaaaaaaaaaccttaagaaactaggcggccgggcgcggtggctcacacctgtaatcccagcactttgggaggccgaggtgggcggatcacgaggtcaggagatcgagaccatcccggctaaaacggtgaaacccagtctctactaaaaatacaaaaaattagccgggcgtaggggcgggcgcctgtagtcccagctacttgggaggctgaggcaggagaatggcgtgaacccgggaggcggagcttgcagtgagccgagatcccgccactgcactccagcctgggcgacagagcaagactccgtctcaaaaaaaaaaaaaaaaagaaactaggcattgaaggaatatttctcaaaatagtaagagccatctgtgacaaacccacaacaacataataataaatgggcaaaaactggaagcgttccccttgaagacaagaaaaggatgccttttctcacctgttgtattcatgacagtacttgaagtgctagccagagcaatcaggtaaaagaaagaaataaaagacatcaaaatagaaaaagaagaaatcaaactacctctctttactgactatataattctatgcctagaaaaacctaaaggctccaccaaaaaagctcttggaactgataaacaacttcagtaaagtttctggatacaaaatcaatgtgcaaaaatcagtagcatttctatacagcaatagtgttcacattgagagccaaaccaagaatgtaatcccatttacagtagccacaaaagaaataaagtacaactagggatacatctaaccaaggagatgaaagatctcataatgctgcacaagtacagccatttaatcttcaacaaagatgacaaaattagcaatggggaaaggactctctagtcagtaaatggtactgggataaatgtaaatgtcagtaaatggctagtcagtaagtgatactgactagctatatgtagaagaatgaaactggacccctacctttcaccatatacaaaaattaactcaggatggattaattattcaaatgtaatatctcaaactataagaatgtaatattcaaatatatctcaaatgatatacaaactataagatatatattatatctcaagctatatacaaactataagaatgtaatattcaaatgtaatatctcaaactataagaatcctataagaaaacctaggaaacaccattctggacatcagccttggaaaagaatttatgactgagttctcaaaagcaatttcaacaaaaacaaaaactgacaagtttttctgtgtagaagctcttagtttaagaaaaagaaaccagcaacagagtaaacagcctacagaatgggtgaaaatcttcacaaactgtgcttccaaccaagatctaatatctggcgtctgttaggaacttaaacaattgagcaaacaaaaaacaaccccatttaaaaatgggcaagcagcatgaacagacagttctcaaaagaaggcatataaacagctaacaaacatgaaaaaatgtctcacatcactaatcatcagagaaatgcaaatcaaaaccacaataatatgctatatcacaccagtcagaatagctattatcaaaaagtcaaaaacaacagacgctggcaaggctgcagaaaaaaaagtgaacgctcatacacggttgctgggaatgtaagttagttcagccactgtgaaaagcagtttggagatttctcaaagaacttgaaacagagttaccattcaacccagcaatcccactgggtatatatccaaaagaaagtacattgtttcttttggatattgttctacccaaaagacacatacactcacatgttcattacaacactgttcgcaatagcaaagacatggaatcaacctaggtgcccaacaaaggtggattggattaaaaaatgtggtacatgtccaccatgggatactacacagcaataaaaaagaatgaaatcatgtcctttgcagcaacatggatgcagctggaggccattatactaagtgaggtaatacaggaacagaaaaccaaatactgcatgtttttacttataagtgggagctaaacattgggtaaacatggatataaaggtggcaacaatagaaactggggactaacagagtagggaggtagggagcagagagaggactaaaaaactattaggtactatgctcattccctgggtgatgggatcaatcataccccaaacctcagcatcgtgtgatatacccaggtaacaaacctgcacatttgttccctgaatctaaaataaaagttgaaattacaatttttaaaaggatagaaactagtcatcagcgtgttttttaattttccaggtgactctaacattcaataattattttaaataattatttctgtctgtagaccttctgccagctactaagtttcaggaattttgatggtctcattaaagagaacctgacaaccccacttacaagtgcttcagctaagtttcatttataatattttcatattgccaaggatccagtagtgtcttttttacagtgagttacaaattcctgtttttgtgacagtgacaggccaaaattaatgagctgtgatttttaaactgaaaaagtgactgtccaatagaggctaaaaagaaaactaaaattatattttgtcaattttagtgttaagtgtgattttttgctttgtatgttttagatagtttttttattgagataaaacccaaatagcataaaatccacctttttaatctcaaagtggtttttggtatattcacaatgttgtgcaacaatcactactatctaactctagaacattttcattacttcctcatggaaccctgtacccattagtagtcactcccagtttcccattcacctcatttcctggcaaccactaatctacttttctgtctctctgtatgtgactattcttaacatttcatgtaaatcagatactataatatgtggccttttatgtctgacttctatcacatagcaacatattttcaaggtcattcgtgttgtagcatgtatcagtattttattcctttttaagacaatactttattataggattataccacatcttttttatccactcatcagttgatggacctttgagttgtttctacttttctgttattttaaataatgctgttatgagcattcttgcacatgtttttgtgtgatcatatgtgtttgcttctctgggcatatacctaggagcagaattgcagggtcatatggtaactctgtatttaacattttgaggaacccccaaattgctttccccagtagctataccattttacattctgaacagaagtgtgtgagggtttctattacttcacatcctcttgctttctattttaattatttaattatttaatttaattatctaagatgccttttaccctaaccaaccagaaaataaacttgactgaatttagtgctaattgtttttgcatagtcattcagtataattgtctttgacatctcaaaacactgcttatgcagaatacacttttttaaaacagtgaaatcatagcaattctatttcctaagtcagttcttcttcagggtagtaagttataggtctttgaggtcatgttcctgtttccatcttccaaaaggcaacattattaaaatcttgttgctgtatctgccttggcatatccccctctctatccagagaaaagatcactgacagaatagtgtccccacctttctatcttagaggtctcattacgagtcagtatgcttttaaaagaattaatggataaagagctagacatcaagaagaagagagaaaattttaaataagacagaggagtgtatgatcactctttctaagatgattaaatgaaataatttgaaaggcaataaactaactgcaccaagtaaatcttgtgaaagcgaaaggaaagaggagaaggaagatttgagtgctgaaaaccaggataaattgtattcaaccaccagcattaagggaagttatacaatacattttatgaagaaagtgttccatgaaaataaaacaacaaaaagaaagtttggtgaaggtttaaatgataaatgccaatagtagtatatgtgcaattatctactgacactgctatacaaatgagctatctatataggctgtgaccacataacctcacctgccaaaccacagtactataaataaatacttttcccagacactacagagctcagttgacttgagattcatcttatggtaactggaaatgtagactgtgcctttatttgggtcaatcctacaattttctttaatgtaccagcaattcattatttaaagtttactagagtttaatttaaaattataaaaaaggaagaaattggctgggtatggtggctcacgcctgtaatcccagcactttgggaggccaaggcgggaagatcatgaggtcaggagatcgagaccctcctggccaaaatggtgaaacccagtctctactaaaaatacaaaaattacctgggcatggtggcacacgcctgtagtcccagctactcaggaggctgaggcaggagaatcgcttgaacctgggaggcggaggttgcagtgagccaagatctcaccactgcactccaacttggtgacagagcgagactccatataaaaaaaaaaggaagaaattaatagttcaggtgagaacttgtgaatttttattctcaactctaagctagtaagtgcttaaatagaagactttacaacgagctgtaccttcttaattctacagagaatcatgaggaaaatcaaatataaatgtgaatttcttatgttcagtattgtccaaaaagaaaatattttattaaattttttgtcagttgccatcattatttaaagccttcctgccagtagcctatactatttttggaatggagtgtttgcagtttcataaccacttgataacaccataggttaaaaaaaaagtctaccagtctttttcagatggcctctttgacaatgcattatttatagggaagttcagttacttttaacaataaagacaagccaaaagaaattacagatctcttttaccatattttgatatactagcagcatccactcaggacaggacctttattaaaagggggcttaaggtacttttaattggaggaattactgaattcctgaagctcttcaaacaaaatagcacttgggatatgacaagagtactttggagaaggctgcttggtcccaaagcagagattcaagaggaggactccagctagctgggtaaggggttccttcctctcaacctaagtgtttatgtaagcctgctgggggccaggaactgcgtaaaactcagtaagctcagtacttctcagcacagaatccagtcccaaggaagcacccagcaaaaatttaggttgaattttctttaaaataaaataaagaaaaaagtaaaattaaaaaaaaaatacaattcaactactcagcccattccattccgggtagttttggctcagaatgctggaagagttggataggctattagtgagagaactcaaaactccccaaactccacttcattactcttcctttatattttttctgaaaagagtattgccaatatatcaataaagctttttgctatgacttcagagtgcccaggtcactagggaaaagtatcaagtagcatcctgaatccacaaatcctttgagagccagccacacagtatctgcgtgagtgtggtaattctctacccttacgagtgtcatcacagaattgcagcattctcttttcattgtttctcaggaaaacatagacaaaggctctgcttggatttttttaatttaacactaatatgtaataatatagcaacatctcctagttatctagaactcaggctttgatagctgtgactgtctagaatacaaccacagaaaatcacctctgaacagtgagggaaatagctgccacagtatcaccacctactccaagcttgaacctctcaacccgcaaccaacagactgcaagtagttcagtacagctttgaatgcagcccaagacaaactcgtaaaccttcttaaaacattatgaaatttttttgcaacttgttcatcagctatcgttagtgttagtatattttttgtgttgctcaagacaagtctcttcttccagtgtagcccaggaaagccaaaagattggacacctatactttggatgtttcatctagtaccgatatacttataattacatgtttcaactagtactaatgaacttatagttacaggatgaaatttcaaattagcaatgttcatcatttgctcttcctaggtaacaacagttaacaaatcataggttgacaatcacaactgattgtgaggatggaaataataacaatgagcatttatataatgcttactctataccaggcacttttctaagaactttacatagattagctcacttaatctttacaataaccctgtgacataccattattatccccattttacaggtgaggaaactgaagaagttaagtaatttgcccaagattacagattgtatgtgattgaggtaggatttgaactcagcagtctggcaccaaaatcagcactctcagcctctacccagtattatcaaaagtaatttcctggtagcttctttcaattgtcatggcaactctcaagataaagaattattgtttttaataaataatgtcattcccagaaatgaattatgtgtgaatcatactaagctgcagtgagagaatgaatatcaccatcacagtggtgaatctacttagtgtaggggtaaaaggccagtctctcccagcagccctgcacataggtacaccgtaattcactaggataatccctgatcgccatgctgtcataaaaaaacgttaaatgatgtttaacaggtttcattaatgattcagagaatcttataatatgtcttaggaaaaataatttcaggagtaactttcagttagctagacaatacagttctgttgagcatctcataatctatgccagacaaaggaaacattcttgcctttctttgagggaattatagaccaacaattttattaattttcaactttcatcgaggcaagattagcttcatgaacaatgtttctcaaactgaaagtagtgacctgtattagtaaatcaatttatagggttgcaagcagcatcatttataaactgaaatcagaattcattgcaggcagtaattttgagacattttattttacatgtgcgtgtgtatatctatcatataaataagtatgtgagaacattttaaaacatttaaaatatatttatatatctaaagtttaaatgtaaatatatatttatattaataatataattaatatgaattaataacatattaattcatattaacttatattaatttatattaacaatatgtaaacaatatattaattagtaatatattatactaatattagtatgtattaatatattattataatatattatatattaattaatatattatatattgtatattatatattaattaatatattatatattgtatattatatattaataacatactattattaatattttaaatatattttaatatacttaaatttatacttaaaatttacatatacatataaataattttcctgaaagtcactttcaaaaactttgaaagccaccagtgcagtggttaagaatacaaattttgggctgggcatggtggctcacacctgtaatcccaacactttgggaggccgaggtgggtggatcccgaggtcaagagattgagaccatcctggccaacatggtgaaacattgtctctactaaaaatataaaaattagctgggcacggtggcacgcacctgtagtcccagctatgcaggaggctgaggcaggagaatcacttgaacccaggaggtggaggttgcagtgagccgagatcatggcactgcattccagcctggcgacagagcgagactgcatctcaaaaaaaaaaaaagaatacaaattctgaagcacagctgttgagttggaatcatggctgtgccacttaataaccaagtgactttgggccagttattttacttctctatgcctcagtgtcatctattcagtagtgagaataatagtacctaactcattctagttttgagaatgaacactttttatattacatataaaatgtgtaggacagagaccccaaagaagccgtagttgctgtcatattgttattctgttcctgcttaagaaggggacttggaaaaataatgatgttgaatgcagtaacttctttcactcatggaagaattacatattcacatcttctttgctcatcaaacctttgaagatcatgcatgtctcattctgtaacatcgccttaaccaaatataaaggctaaatacaaaggtgtttttaaataactgatacatttaggccagtcacacaaagattttacccaaagcctatgcaggcatagtccaagaagtagacttgttctactgcaatcaccatctcttgtttattatttgtgaaaggaacattatggtttcaccacagttggcctggccaacgtgcttatgcagtcctcagaacatatgaaagtgatttcggctgacaataagtatttcctcactttggcttatgttcaataatagccattctttatccagatcagggtgactgagcatgctgtaaccattcttctcttctaaaactgacccttgtttgactgcatatgcagattgcttagcagaacccatatccaccataacgggccaaaagtcatttgatccaatgtgcttttctttttttttcttttttttttaattccatgaaattttattaagataaattaattataaacattgcaaaacacttttttttttagacagagtctcactatgtcacccaggctggggtgcagtgacacgatctcagctcactgcaacttccgactcccaggttcaagtgattcttgtgcctcagcctctctgagtagctgggattacaggtatgccccaccagacctggctaatttttgtatttttagtagagacggagtttcactatgttggacaggctggcctcgaactcctggcctcaggtaatccacccgcctcagcctcccaaagtgctggaattacaggtgtgagccactgctcccagccccaaacatgattttttgattgaatgcttaatgtctttctattattattatttttttttattatactttgttctggcatgcatgtgcacaacgtgcagatttgttacataggcatacatgtgccatgttggtttgctgcacccattaaaaattaattcaagatggattaaagacttaaatgttaggcctaaaaccataaaaaccctagaagaaaacctaggcaataccattcaggaaataggcatgggcaaagacttcatgactaaaacaccaaaaacaatggcaacaaaagccaaaattggcaaatgggatctaattaaactaaagagcttctgcacagcaaaagaaactaccagcagagtgaacaggcaacctacagaatgggagaaaatttttgcaatccgcccatctgacaaagggctaatatccagaatctacaaagaacttcaataaatttacaagaaaaaaaaaaaaccatcaaaaagtgggcaaaggatataaacagacacttctcaaaagaagacatttatgcagccaacagacacatgaaaaaatgctcatcatcactggtcatcagagaaatgcaaatcaaaaccacaatgagataccatttcacaccagttagaatggcgatcgttaaaaagtcaggaaacaacagatgctggagaggatgtggagaaataggaacgcttttacactgttggtgggagtgtaaattagttcaaccattgtggaagacagtgtggcaattcctcaaggatctagaactagaaataccatatgacccagtgatcccattactgggtatatacccaaaggattataaatcatgctactataaatacacatgcggccgggcgtggtggctcatgcctgtaatcccagcactttgggaggctgaggcaggcagatcacaagttcaggagatcgagaccatcctggctaacatggtgaaaccccatctctactaaaaatacaaaaaattaggcaggcgcagtggcgggcgcctgtagtcccagctactcgggaggctgaggcaggagaatggcatgaacccgggaggcggagcttgcagtgagccgagatagcgccactgcagtccagcctgggcaaaagggcaagactccgtctcaaaaaaaaaaaaaaaaaaaaagacatatgcacacgtacgtttactgcagcactattcacaatagcaaagacttggaaccaacccaaatgtccatcagtgatagactggataaagaaagtgtggcacatatacaccatggaatactatgcagccataaaaaaggatgagttcacgtcctttgcagggacatggatgaagctggaaaccatcattctcagcaaacgatcacaagagcagaaaaccaaacaccacatgtgtgttccaacttaactcattgttcttagtgataattcacttaggggcaaagttaggctctcttgttaattgcaacattcctttcagaggtgctataaatggatgttgaactatactatttttagatttaatctttaaaaatcataagaaagcaagaaatattactagttcagaaatgattttctgttcctggctaatcagagaagacctaagagtctatagtagtcatttgttgtcttcgtagtaaaagtaagattctaataggatttttagacatagtgagaaaggtgttcattttaagattatggtagttcctctcagatttagaaagccttaagatgacactaaggagttggactttaggaatgctgagtgtcttcagccacagcggcacaatggtactagatgtgacaggatgtgattaaggagaaactaaacggccaggcacaatatagttcttcttgcctccaaaagaggagtcacccactttctcacactcactgtgatacattccatttgctaagaaaagtggcttgtgtcattcttgagcactacttttaagttctgatatattaaattcatttactctgtattaatagcattcaaatatttagtaaagttaatatacctctcacactttttccaaagtaacccaccagctgtgtcctgtgcttcaagctatcttataagactgcaatcaaagtgtcagccagggctgtggtctcatctgaaggctggatagggaaagattggttcccatgcttatttacattgttgttggcaggattcagttcctcaaaggttttttttatttttatatatttttttttgagatggagtcttgctccatcaccagactggagtgcagtggcgcaatcttggctcactgcaaactccgcttcccaggttcaagcaattctcctgcctcagcctcccaggtagctgggattacaggtgcatgccaccatgcccagctaatttttctatttttagtagagatgggatttcaccatgttggtcaggctggtctcgatctcgtgacctcatgatccacctacctcagcctcccaaagtgctgggattacaggcatgagccaccgcgcccagccagttcctcaagggtttttatactgagggcctctacttcttgctgagtgttggccagaggccatgcttagttctctgctgtatggttctcaccacacagcaacgtacttcatcaaaaccagcaaaagggtgagtctgctagttaaaaagaagtctcaatcttttgtaacctaatcatagaactgccatccactccatgctgccatattcttctgattagaagcaagttactcaagggaaggaaatacataaggctgtgaatgagagaagacaggaatcattggaggctactttaggggctgtctgccacagcacttaacagcacatacccagccataaaatttaaaaaagccggaaagagagaaggagggtgcagggtaaaataaagaaaagaggaaggtggaagggaagaaaggaagggaaagaaagacatttaaaaagacaagaacaaaacagctctgctgcacaacatctgtatcggagttccatgtgcagacacacacgtcatcacatcagcaccacacccataaatttcctatttcttatttacaatgagaaggtaataaggactttctatgcatctggagttaaaaggaaacaataaatctaagaatactaagtttaagtaatcaaaatgtgtttcagattagttattttttctttttaagtttttttttttgtttcagctgacaaagttttttatttctttctgtttcaagttttgaagttgagtttattattcttgctattatgtaacaggcatattttacagagaatataggaacctgattgacatttgtatttggtgttctattgttgtttcaattcaaatgccaaaattatgtttttgttgtgtacgttattgttcataattatatatgcctcttaattgtaaaagcgaagctgtaaaattgtaaagtactttgtgtctcatctattccaggcattctactaaggaaatcaagaccaaatggcttgggaaggtcaacgttaaatagtgtcagagccagaactagagtacacatctctcaatttctaatctagtgcatttccttttcttatttctgtgcaaacgaacagttagaatgtgaaatagtctcctcagatataccagcattaaaacagttgtggtttaaatatttagttttaataattactaactttgtagaaggacctaaaatagtgtttgttttcagtgcttcaactaatagtaaaaaggaatattttcagtgctttactgtatgagaggtgcttgcctaacgaaatacacatctttttcactgtactcatttgtaacagataatgtgggctcgtacacctcagtgttctgagaggggttggtaaacactgaccacatagagagagctgcccatctgccctcagtaccaaggcacatcccatccatgccctaaaactcttgtaaatttctccattcatacaggaaaatgagtatttcttacaacaatatgaccgtggaatttgattacaaaaacactcctgctatccccaacctgtgctcccagggctaaagacatatttgcaactcaggattttctgaagattcacttgtttgtactattgagggcaacagttgttctcaaacaaggatgcagttcctttcttcttaccctgcttatttttctttttattattattattattatactttaagttctggggtacatgtgcagaacgtgcaggtttgttacataggtatacatgtgccatggtggtttgctgcacccaccaacccgtcatctatattaggtatttctcctaatgttatccctcccccagccccacagccctcaacaggccccagtgtgtaaagttcccctccctgtgtatgtgtgttctcattgttcaactcccacttataagtgagaacatgtggtgtttggttttctgttcttgtgttagtttgctgaggatgatggtttgcagcttcatccatgtccctgcaaagaacatgaactcatccttttttatggctgagtagtattccatggtgcatatatgcaacattttctttaaccagtctatcactgatgggcatttgggttggttccaagtccttgctattgtgaacagtgctgcaataaacatacatgtgcaagtgtctttatagtagaatgatttataatcctttgggtatatacccagtgatgggattgctgggtcaaatggtatttctagttctagatccttgaggaattgccacactgtcttccacaatggttgaactaatttacactcccaccaacagtgtaaaagcgttcctatttctccacatcctctccagcatctgttttttcctgactttttaatgatcgccattctaactggtgtgaaatggtatctcattgtggttttgatttgcatttctctgatgaccggtgatgacgagcattttttcatgtgtctgttggctgcataaatgtcttcttttgagaagtgtctgtttatatcctttgcccactttttgatggggttgttttttttcttgtaaatttattgaagttctttgtagattctggatattagccctttgtcagatgggcagattgcaaaaatattcccccattctgtaggttgcctgttcactctgctggtagtttcttttgctgtgcagaagctctttagtttaattagatcccatttgtcaattttggcttttgttgctattgcttttggtgtcttagtcatgaagtctttgctcatgcctatttcctgaatggtattgcctaggttttcttctagggtttttatggttttgggtcttacgtttaagtctttaatccatcttgagttaatttttgtataagatgaaaggaagggatccagcttcagctttctgcgtatggctagccagttttcccaacaccatttattaaacagggaatcctttccccattgcttgtttttgtcaggtttgtcaaagatcaaatggttgtggatgtgtggtgttatttctgaggcctctgttctgttccattggtctatatatcttatttggtaccagtaccatgctgtctttgttactgtagccttgtagtatgaagtcagagacacaataaaaaaagaaaattttagaccaatatccctgatgaacactgatgcaaaaatcctcaataaaatactggcaaacctaatccagcagcacatcaaaaagcttatccaccccgatcaagtcggcttcatccctggaatgcaaggctggttcaacatacacaaatcaataaacgtaatccatcacagaaacagaaccagtgacaaaaccacatgattatctcaatagatgcagaaaaagccttcgacaaaattcaacagcctttcatgctaaaaactctcaattaactaggtattcatggaatgtatctcaaaataataagagctatttttgacaaacccacagccaatatcatactgaatgggcaaaagctagaagcattccctttgaaaaccggcataagaaaagaatgccctctctcaccattccttttcaacatattattcaaaactctggcgagggcagtcaggcaagagaaagaaataaagggtattcaattaggaaaagaggaaattcaattgtctctgtttgcagatgacatgattgtatatttagaaaaccccatcgtctcagcccaaaatctccttaagctgataagcaacttcagcaaagtctcaggatacgaaatcaaagtgcaaaaatcacaagcattcctatacaccagtaacagacagagagccaaatcacgagcaaactcccattcacaattgctacaaagagaataaaatacctaggaatacaacttacaaaggatgtgaaggacctcttcaaggagaactacaaaccactgctcaaggaaataagagaggacacaaacaaatggaaaaacatcctcatggataggaagaatcaatatcatgaaaatggccatattgcccaaagtaatttatagattcaatgctatccccatcaaactaccattgactttcttcacagaattggaaaaaaactactttagatttcatatggaaccaaaaatgagcctgcatagccaagataatcgtaagcaaaaagaacaaagctgaaggcatcacgctacctgacccagcttatttttctacataggatccccacatccctgcttttgctagaatggaaactagacaaggaccaacttttatcaacttgttcatttctctattcctagaacacagcctggtacaaaatttgcgtttaataatgtttgttgaatgaatttgaatgatggatttgtttagaaggtttataacatcccatgccttatgagtttgttgccagaggaaaaaagaagcctgtttttggttcataacatcaggtatgtaacctggaatttggaatcatgagtttttatgcatttgcttcatattatttatttttaagagatctttcaaagtattgacaaagatactttaagattgagagcctccctgataacccaggaatgagagttttagattaagtttacaatatgattgaaggctaatcatataaggagaaaaaaataagaaaaagaagagaaatttgaaaagaaatctccaaaatggccatggacatcagaacactgagaattcatacacaaaaatgtgttttgcttcatacctgtctgttgcacatctatacatttcatagatgcagaggaattttggctaaattcctaacacatgagaggcattctgcacttacttctcaaattagaattaacacatgagtatgtataagttgtttagagtgggcatctatttaatgagtttactggctgaatcttttaaaagaatgcaaacataagtgccttttatcaaaaatcaatgaaaagataaaaggccctgtagtgcatgctgtggttcccacactacatcccccacatccacctgatgtcatcacaactgtctatggtgtccatttgccactatgcaccctgccgggcagactcaggtgcctgcctcggcaaagaccctcagctcatgtgcaggtacagcctagaagtgcatgggggtgaacatctctgaggcacccttcaaccagtgagtactgggagcggtagataaatatcctagcctctcatctttctacacaacagtggtggtgcatattctacacagcttctcaaaggagcctcagagggattgggccccattagccactgtgataaccagctcagaacacacacatattagttgttctccctttccttcccaccctccccattccctgactgctagatccagaagtcatcttccagatgaactacctatatccaaatcctaatctctagctctggtttcttaaacaggtcctatgaaatgcttgaaataaaaggcaaaatggtttgtgtctagaatcaaaggctgacaatggcaagcaacaggcactaaaactatgacccaggaaaaatgcttttctggaagacatcggcattacctcctagacacggaatacactggcttcatcccagtagtttcttcacacactttagatacgtgtctcattaggatcacatatgactcacctgatttcatgccttgccttttctttttattctgcagattcttctaaggagcctaaattcaccaagtgccgttcacctgagcgagagactttttcatgccactggacagatgaggttcatcatggtacaaagaacctaggacccatacagctgttctataccagaaggtgccaccatcatgcctttctgattttcctctccatggatgtacctactaaagtacactgagtcagatgtactgtgggaatggaagtgatttgttgtgatttatgcaatcaatgaatattcattcactcatttattgaaaaaaatattaatcaagcccatcctatgtgctgagtactattttaggccctggagatatagcagtgattacaaaagacaaaatccctggtctcatggagatttccttccaatgcagggagacaggcaataaaaattgaattaaatgtcagctagtaatataggttattaagaaaaataaagccagaaagcagcatatcagcagtgtgtgggagtttgtgtatgtgcatgagaatgtgtgagagtgtgtcaaagtgtgagtgagagcatgtatggatacacgtgggcatgtgcatgtggatgagagtgtgtgtaaaaggcttgaatgatgctgaaatgcgtggtcctaggaggcctctctattgtggtgtcctagaccagagacataagtgaaacgggacaggccacgtgagtatctgggggaaaggctatgcaggcagaggaaattgcaagtacaaagtccctgaggcagtcttggcatatttgagggatgaaaaaggccagcactgaaggcacaagattgaaagtgaggagagtgatatgggaagggatcagagagttacttagggactgaccatgccaaacctcataggcaagggcaaggctttgaattttactttatttgtggtggaaagctgtaggtgtttttgaaaagatatatgctttaaaagatgtagctttgtttctaaccagataatacactccttctcttaaatatattcagtaaaagactgtagtactttttcatttttaccagtgaccctctaaaataacagaggaagggtgaaacaaagacctctcaatataggtaccatccaagttgtttatttcttccccttcacctggcattattttcatttttgtttactctcactgtgtatatttttcccttttttacattttaggcttaaacacttcattatctcctgttttccacccaacccccagagaaggcctaagccaagatgcagggttagtgaggaccctttatccttggctcaaggtgttcgttagtcagaggatgacattgtctatccaaccgaagagctggaatagggaaggaagatgcagccagcagttaagggtatgagctcagggctaacaaacctgcacttcagtgtagttctgcactttctcaccaaggaatactagggaaattagccagtttgtgtacaactcagcctcctcatttgcagaaaggagataatggacttgcctcatgacttcttgtgaggatcatatgagataacccatgaaaaatacttggcagagtacttgacacataataagtactcactaaatggtagctggtattcttcttatcggtagtatagtgataattttaaaataattatgatatagaaatccagttcctggactataaaatgactataaattgtataagaccatttataccagtaaattgttataattattttaattattggtataagagcattttaatgcagagctgctgcttaatttgcagataaaaaaatacttggagttagcaaccaagcagaccttccccacctttcagtataagagaggtctcttggatgaagtgaagtgaagatgaaatgtttgggcaccaagtatactatatttttccttaaggctgacaccacagagaggttggggccagtaaacagagttgatttctataaatacattcagacatgaagttagtatgtttgatgacacttttgaaatgtgtggaatcattaagttatttgtacaggcacaattagccaaactgtaaagaaaagtagcagaataacctcttaagctgggcccactttatgaaaataattttttgctacctcaatatttaccaaatttgatgagcaaaaagagaaatccaaaggaatgaagccttgataaatatatatcccttgccctcatcaatcagggtcacataactctgtccacaggcatcttatgcacactccagtcatttcagcatctctggttcaaatccaggatctacactaccaaggatgctgctgaaagtgtgactgggtaaagggaaacgttcagacatattcagaaagatgtcttagattttgccctggtagtgtttggaatcccaggagggtaagtacagcttcatgattaagtgccaacccaaacttacaaaattagatatttgtgttttttctataaaatataactattttgaatatcttagccaaactactatgagcccacagcccagtttatccaagaaggataaaactgagggattaggagtatcaggactggactggactgattagtgtacagttatatttgatttctcattgcccacttcacagagaagacaatacaaatgcactttctgactcttatcactgtttcttagaactcagttgccaggcaactcctgaaactatagaaacatgcttctcatccctgacacataaataaaactctgagatgattttatccaaagtcagagtcagtgggcagtgcagttgtttcagtttgctggcctggcctcagtatctaaagcacaacagaacgtgaacatgtcaggctgtcaacaggacagttcaggcacagccctacaggcagttgtgtgttttgcctggctctgctccttgccaggtggctggcagaaaaggcagcctccacatgttagagcagcagattcaaaacagtgtctgccatcctgtgatgacgatagtgccaaattcagcctctgagcttgcaggggactcaggatgaatgcacattacaggcatggtaaaaagaggctctgggaagcatgttcgagctgctctgctctcagctccttgcatgtaaatgctgtgtttttaaaggaagtgggcatgtgaacactcagtccttaaggctgtatcccccacctcttccatacccattcaaccccacttcaaaaattaccctggtcttaagagaaatttcattttctatacaaggttgtgtggaaaatcagtagggagaaagggcattattactttcatttttctttaacaaaagtattaaatttaaagccaaaaacgtgcgctttctgtcatgaaaacagctgcccttaaaaacataaatgatgttttatttttattacttttatctagttggttgtctttagatgaaaaacatttcttctgctctttattcttatttttaatgatagtctctttctatggttctcaccccttccatttcacaagatagtctgggagcaaacctaaagcacttaacttttgggagtaagagcagaggggagcttccatacattgattttggtcatctgtagagacattcaacccagagaaggcaagtgacacagtatctgttttatgagctaatttgggttcttgtctacatttaatagtttaaaatataagttataaatatttatttaaaatgaaattcaacattggttcatgaagaaagaggttggaagtagtgttttgaactagctgtttctgatccatcatgcttaaaataaatgctctgtttgtcctgtggagttcatggatttgggataatctaaacagggttttttaaacagtcctcatggggaacaaggtactgacatgcactgttgagaaattctgtgaatcatgaaagagctaatcttttagaaatccagacctgttaagcactaatctacatctttggaatatcttaatactttgagttttctaacttttatactatcacttatgctaagtacatttgatatcccttctattatgtgaaagcctcattttctgggcaattttcttacaactactctctttaatgcactcttacttaatttgaaagtaaatatcaaattaagcatactatagttcaatgaaccacccacctattcctaatttttttaacatttctcttctgactctacatacacacatacttacacacacacacacaaacacaccttatcttttcttctgccttttgcccatttactttttgcatcagagatgaatctctcattcaagcatatgcaactttttttttttttgagatggagtcttgctttggcacccaggctggagtgcagtggctcgatcttggcttactgcaaactttgcctcctgcgttcaagcaattctcctgcctcagcctacctaccgaatagctgggattacagaagcatgccatcatgcccagctaatttttgtatttttagtacagatggggttttaccatgttagccaggctggtctcaatctcctaacccatgatccgcctgcctcagcctccgaaagtgctgggattacaggcatgaaccaccgtacccagccagcatatgcaacttttaagagtctcaaccaaagcagcaattcactgtctcagaccctggagtctctgccatttaaatcccaatttccttccaacagctgaggagcagctgtctcaaggaccctctgatactacacaagttttctcctagtgccaagcagaccagcctgagaaacagctataagaaggaaataggcgtcttctcccagcttggcatcctttccttccaggccctgccttccctacaacctgcattgtcttcattgtccactgctgcccagcacccatcccacagagggatggtcccaaacctccacagtctggcctgtgagccacaggcgcctctgcctgcacagggccattcctacctcatcttccacaaccacagattacatggttttatgtccctttgacttatatattgtcttctcaattaataggctagtgaataacatggagatgatgaactacctcacccaagtagcaattctaatttaagaaaattttcctgtcattccattgccttttacttccattaccacactcatgcccatacttccttacctcaatccctttgacctctctgtttattcccttccttgccgtattgccatctattaaacttttacccatccttcaagaatgctaaaaacatacctccaccttgaagccttccatgaagagccagagcaatcattccctcttctgaacttttaaggaccctagagagcactactaatgagcacttacccacattgctttgtaatatggttttttactctttccttctgaggcaggaggaattccttagacatctatgaatcccatagtgtctgtcattatgttttagacataaccaattctcattaaatgtcaatagaatgaatataagaggcccaaaaaactactcagatgggaatttgagtcttattttagcctgaaattaggggaccacatcttacttatctttatatctgcacagcgttggtgctggatataatgcatcactctgcctggagcacacatcaacttgtctcctcagtttctttcaccataggctggtgaaacagccaggtctaaaccttcactgttctctgggaatctctagtttgggggtgattctctgtactgttttaatgaacatttttaaaatgtccctaagtctcagaaccttcatctatacaactggcataataaagtacctaccataggaatcgatttatgagcaggcatagcatattcattcaataaacggaagttttaccataggcagaagtaccaaacggcctcgtagcagtcgtcagacactgatgatactgtccactgatgtgatatgtctcggaaatgatgttactaaaatacctcttcacaaaatatttgtcttccaatttattgaatcagactatcaagcaccttacttggacttaagctacaacatgatttttggaacaattaatctttttttaacccttcattttaggaacactcaagaatggactcaagaatggaaagaatgccctgattatgtttctgctggggaaaacagctgttactttaattcatcgtttacctccatctggataccttattgtatcaagctaactagcaatggtggtacagtggatgaaaagtgtttctctgttgatgaaataggtaaatcacaggtttttgtttcatttgacatagttttagactaaataaatggggaagcctgcaaggtccaagtataatcaagtaggaagactttgtaacagtgttctatagatacatggagatctgttttacaggagatgggatcagctggtgaacaagaggaaaagggcagggggaacttaagttgactttaacataaagtagcctggcagtaaatgttgtgaagaagagaataggaaccttgtggagtcttttcctttaggatatctttgaagctgcgttgtgtttttatgttccactgcaaagggtgaacttaatatattcttaggatttcttacttcctaattatttgataggatccttatattcaaattcactgaaatacgttggcctttgacctctaccattgctgtaatcaaagcctagattttctttatcacaaagcataatcattctggaattttacatttacaaaacagccacagttactttaaagacatgtttattagatctcagaacaaatactggagacaatcagctcagtgaactaagtgaaagatccaaacagaggatcctttgcccatcatatggacacaaggtggaaacaaaacaaataaaacaaacaattgtaattagaatagtcatgtttataccttaatagtataaatagcaaaatagaaagaatcaaagaaggactttgagtagctgaaattagtgcctcaaaatctatccacaaaagctcatttgttgcttataggaatttctcgttgcttctcccaaatgtattgttctttttatgtggttttctaggcataagctgactggaagacataggagtatgtggctagaacttacagatagaaacaaataaaatctaataggctgactttaagggagaagattaagagaactgtatcaagcagtaaagataacccaattgctttgcaaagacaatttagtatgtgtcctaacatcactgggtatagctgttgagttgaaactaaatgggatagcagaatgggatagtagcaagaacactgggttaaaacccatgttctagccctgttctctgccaatagccagtcctactcatttacctggctgacatgcctgtcatgtgtcacgcactgttctggtggtggtggttatagaataagtacaatacagtcaaagagggaagtcaggcatgttcacaaataattgcagtgcagcgtgataggtgttagcctggaaatacgtggaatgcagagctgcaaaggtggtggccaaaggcgtgaatgactgacaggcctgagggatgaggaagggctgcacagagatggtgacagtttagttacctctgaactggaattggactctccctatttttaaaaaagtgatgacccacagtggtcaaaagcatgagtgagtattgtcaggtaccacagtggacttgcctttcagtaactactaagttccaacagtaacttagtagttacttagtaattacaacagtaacttagtagtcccaacatgttcagggactcaggagcagttaggaagccctcctagtcagctggagaaatcatcagtagttgtttgtgccccaaaaaggaatttggactttaactgtcacgaggtacctttgaggatgtttaaatagggaaattacttgaggatactaatagttaacagtcacaaaagtcttaccatgtgtcaggtataaaaaccatcttttgcaatcacactttacagataatgaaaccgaggcacagagcagttaaaggactagttcaagtcaaacagctagtagatagagctgggatttgaacctccagcctccatgctcttactcttgaggctttgcagtaccacttgtctctttattaatgctcagagaaattaatcttgttgcaatgtgaaacgtagattggagtgggacggactagaggtagaagaggttaaaagactgagatgatcaaggtaaaagattatgacaggtagctacaactagcacaatagttgtggggcaaggtgctgagagtgaaagagaacaaagaactaatgtaaccctggtagatcttgagaaagttgtcaatcattataagcctcagcttcctcataaaatatgtatgtatggtactacctcacagggctattctttggatttgaagtactatattagttagacatttgtcattcattcaattcattcagcaaatatttattatgctcttctctcaggccagtcaatgttctccatgctggggatagaaactgtcttccctggtgggatttaatcccaacgaggatggaaagcgacaatgctatggagaaatataggaaaggagaataggagtgttggagaggttgcagtgttgagttttcaggattggcatccctgaggcagtggcatttgaataaagaaggattggagaggataattatgtgtgtgtctcagggaagggcatttcagcaagggggcacgccagaagaaagatctcaaagtaggagcatgcttttcctcactcaatgaacagcaggccggcggtggagtgggcacagagtgagcgaggagactggtatgagaccaaatcgcacagacaagacagtcaaatctacccaaccattgccaaagactttggctttcacttggagtgaggtaggcagcctttggagggttttagatgatgagcgatgtgatctaacgtaagtgttaggataatcactgtgtcagttcgcttgaggattgcatggagaatagactggagggggacaaagaccaaaggggtacagtggggagacaaatgaagcaagaagaatgaaaaaggataatggccaggaccaggttattagtggtgcaggcggtgggacatggttggattctgttatatcttgaaagtacagctgacggaatgtggattagtgaggaaaagatgagccaaggacaagttcattgtttttatcctgagcaactagaggaattgagtcctcgttaacagagatggaaaagaggaaaggagagcaggttttggagaggaagagcaagggtttgtttggggatatattaagtttcagatattttttaaatatctcacaggagttgtcaatatagcatgtagatttatgtatagagataaaggagaggtcattattatgcctgtaatggtatctcacaggaggtcattgttatgcctgtaatggtggtaccaaatcttttccaaaaggaccttgtctcatatcctctatttttcaaatgcagcataagtaatgagttatagaaaatcttccattaaaaacaattttatagtttggtcactttaaacggttaagctttgattatcaggattcctgaatctccaacaaatccagaagggtgaggaattattgccattatatcggcatatgtagtttggccattttgcatatccttccaatttaattttcaaaatgtagtcatgattcatcaaattttgactctccctgtttttaaaaaggtggtgtcgaccccacagagggcaacagcatgctcctccaccataaggcctgttttcactgtgggtgcacacaagagcttccctctttggccaacagatttgacagccagtaagagctcctcactgtgtatatctgtaaagttatctccagtcaacgctagggatgcacactctgcaacactctaggtggccttctgtatatatggcagaaaaagaaagtaaattttactctgtatctgcaagtgattttcaaaaccctcagtaatgagatccaactagcaaaaatttaccaggaactctctagaatataaatttagacatagttcctagctttggaatccatatttttcttcatcagcctctgagaaattgtggtctttgaggtcctactaagcagaatgcaacaaattttcgtggaactgtagagtatatcaatagaacctgaggaaaacaatgtttcaagttgttcatgtgacagtcaaaaagacagaaaacactgaattgtcaccatttgtgagactagcataatgctttcttccttcttatgtcagaagaaaatatcacatgtggctaggaagatcacaaagctagggagcattagcagagtgtgcaggaagattgtatgagaagattgaagaagagtaaaaaaggataatggctaggaccaggttatagtggtgcaggcggtgagatatggttggattctgttatatcttgaaagtacagctgacggaatctgacggaatatggattagtgaggcaaagatgagtcagggaacaacacagaaatgaggtaaacagggtctctgcccccaggccatacatagttgcaagaaaaaaggtttctctacccctagttccgaagcagccccatgtctaaattctgtaagtctttctgactctctgttttttcagtttcaagtgaaaataaattcctttgccaaaatcctgatgcatttatgatatcagagcaaaaagaaatatacaacatggcagatcttgtaaatagtgatcagatgttttactccaaaaggaatttttgtaagggcttatttagaagttaaaaacaagtcatccttgagttaaaaaaaaaagttactctcttataaagtgaaagttataataagaaaaatattggaagaaataagagcatgaatgatcaaaaatgtagaaagtaatttggtcttctgagaagaatgccttccattaatattaaattgtgtctgtctgtgtactaatgctctgttgaattgcacagtgcaaccagatccacccattgccctcaactggactttactgaacgtcagtttaactgggattcatgcagatatccaagtgagatgggaagcaccacgcaatgcagatattcagaaaggatggatggttctggagtatgaacttcaatacaaagaagtaaatgaaactaaatggaaaatggtaagatgttgctacaccttacactttgacttttctttctatttcaacaaactctctctcatttatcattagactttcctttgacctaataccacatgttcatgctgtatgctccataatttcttaattgagaaaacattatttaaccggtaaaatattgtcttgaaattctgtaagacaggagatgcttatgtatatatggaggcctgtggaaggaaaggaaaactatttctccattcattcttgctgtccagtttaactttagagcaaaattatagactggccacttagctgtctttggggatgtggataaaaatgggaaagtttgtgatccagtcaacagtgactatggccaaatattttcccatgatttcagttgctgctactcaaaggactcccactaaaacaaattcatacgtgtctataggaaaacagagggagggaatttgtctcttagaggtttcagaaggatgttttgttacatacctcagagaagaatcaagctgagattcttatgtaggcaattagagagcatggtaccagttgacctctgaatccctctcttccttaccaagcatatggaactcagcattttgataaatttcacatggcacataacaagaggaaaaacaggagtatcatgctgctcccaatataactaattctaaatctgtctaaccacagccacagccacagccacagccaagccaagcagtttctggccactcatcaggtgatgcccagcagcctggcacagatcactcccagaattttgagacaccaggacattcagtgagccactgaaaaagatgccaattttgtcattagaggaaagttaagtttggaggaaatttgagtagttacaatactgggctttgaggctctattttctgaatcattttaatttagatatctgttctgtaacttggtacaaataaaatgcctgattggatgctaagtcaaacaagactgtctaaatccaagctacaatcaaacattatttaacaacaggtactgaaataactactatgcagaaggcactgtgctaaatgcctgaggtggcggttctcaaagtgggagccacagacccttgagggtccctgagaccctttcagggagttcagtactattttcacaatacactaaaatattattttattaactatgttgaaatttaacttaatggcacaaaagcaatgctggaaacactgctggcaccttagcatgaagcaaggcagtaggatcaaattttactaatagtcatgcactcccaatgaagaaggaagaaaaagccagtttcacgtttgaagttcttgatgaagctgtaaaaattgttaattttactaaacctcgacctttgagtacatagcttattaatattctgtgtgacatatgggaattacacattaagcatgtctgctgcgtactgaggtattgtatttgtcttgaagaaaagcgcttaaatgactgagttgccagctgaactagttgcttttattgcttggagcaccatttttacttggaagagccattgataaactggcagatggttattcatatttgaattggcaaacatttgtcaaaaaagaatgaggcaagcttgtcgcttcaagaaaaacaactgacagtattttttgcaatggaaaaaatttgacttttcaaagcaattcattttgcctttttcgaaaatttgtgtctccaaccgtgagcttgatagtgttttaatatttgaagacttttcttgaagagattgatggtgatattaatgaaagtgactttttaattatattgtgtaataaaatgtatgaacatttagaaaaatctacaactcagttaaccaatattttccaaattactaatacatgatgtaatcaaatcatgcatggggaaatgatccattcaaagtactagatagaatcgtgaatttttttaatgatcaaaaatttttttgtatatttattgtgtacaacatatttttttgaaatatggatacattgtagaatggttctatcacactaagtaacatatgcattaccacacatacctttttttgtgtgttgagaacacttaaaatctactcagagattttcaaaatacaatacataagcattaactatagtcaccattttgcacaatagatttcttaaactcattcctactaactgaaaattttaattctttcatcaatatctccttaactctgcaccctgcccacaacccctgataaccaccattcaactctctgcttctgagttcaacttttttagattctgcatataagtgagattatgtggtatttgtttttctgtctctggatcatttttcttaatataatatcctccaggttcatccacattgtcacaagtgacaggatatccttctttttttaaggctgatagcattccattgtatatacctaccacattttctttatccacttatccattaatggaacataggtcgattctatttcttggctgttataagtaatgaacatgggagcccagatattctggctcaacatactgatttcattttccttggatatatacttagtagtggaataatataatggatcacatggtagttctatttttaatcttttgaggaagcttcatattattttccatagagggtatactaatttacactcccaccaatagtgtgcaagggttcccttttgtccacattctcaccaacacttgttatctcttctttttttgaaaatagccatcctaacatctttgtgcactctatgccttctgtgagctgatagctcattgtggtttaaatttacatttccctgatgattaaagatgtcaagcatttttcatatacctgttggccatttctatatcttctttttaaaaatttatattcaggtcctttgcccattttttaattgggttattttcttgttattgaattgttttagttccttatatatttcagatagtaacttcttatcagatgtatgcaaatattgtctcccattccatagagtgtctttttactctgttgattgtttccttggcagtgcagaagctttttagtttcatgtaatcccgtttatctatttccacttttgttgcctgttcccaatggagtcatatccaaaaaatcattgcccaaaccaatgtcatggagctttttcctatattttcttccagtagttgtacagtttcaggttttacatttaagtctttaatcgattttgagtttatttttgtatatgaggtaaaataagggtataatttcattcttctgcatatggatgtccaattttcccaacaacatttaaagacagagtcctttccttactgtgtattcttagcacctttgtgataaatcaatttactgtaaatgtgtggatttatttccgaacactttattcttttacattggtttatgtcatttttatgccagtaccatgctgttttgatgactatagctttgtattatgttttgaggttggtagagtgatgatttcatccttgttcttcttgttcaagattgctttggctattcatagtctattgcagttgcatacaaattttagaattgctttttctatttctgtgaaaaatgacattggaattttgataaggattgcattgaatctgtagattgctttaggtagcagggacattcgaacaatattaattcttctaatccatgaacatgggctatctgttcatttatttgtgttgtcttcatgttttacagttttcagtgttcagatctttcacctttttgtttaaatttatttctaggtcttttattttatttttatttttatagatattgtgaaagggatttctttatttctttctcagattgttccttattagtgtatagaaatgttactgatttttgtatgttgactttgtatcctgcagctttactgaatttgtttatctgttctagcaattttttgttgaagtctttagggttttctatatataaaatcatgtcatctgtaagcaaggacaatttaactttttccttctcaattttggatgccttttatttctctcttttgcttaattgctctgactaggattttgaatcgagtagaatagagtagaggagttacattgaataaaaatggcaagagtaggcatctttgtcttgttcctcatcttagaagaaaagctttccacatttcactgtttattatgatgtgagtttgttatatatggcctttattgtgttgaaatacattccttctatatctaattgttaagggtttttatcatgaaaggatattgaattttgacaagtgcttcttctgtatctgttgagatggttccatggttttcgtctcggttctgttaaagtgatgtattatgtttatgtatttgtgtgtgatgaaccatccttgcatccctggaataaatcctacttgatcatggagaatgttccttttagtgtgcttttgagttagtttcctagtattttgtttaagatttttacatctgtatttatcagagatattagcccataattttcttttcttgtagtgtcctttcatggtttgggtataagggtaatgctagcatcaagaaatagtttggtagtatccccttttcttccactttttggaaaagtttgagaaggattggtgttccggtgaagcttccagtgaaactgtcaggtcctggacttctctttgatgacagactttttattactgattcaatctccttacttattattggtttattagattttctatttcttcaagaaagtcttagtaggttgttgtgtgtaggaatttattcatttctcatgcatataatttttcagaatggtctcttatgaacatttgtatttctatggtattggttgtaatgtctcctccttcatttctgattttgtttttaatttgggctttctctttttttattatttagtctagctaaagattggttgattttgtttatcttttcaaaaaaacttgtttcattaatcttttctactgttttaatgtgctaactgaaaagcacattaaaaggatcattctccatgatcaagtaggatttatcccagggatgcaaggatggttcatcacacgcaaatacataaacataatacatcacattactagaaccaaaaacaaaattatggaaccatctcaatattttctattctctatttcatttatttctgttctgatctttattatttccttccttctatgaactttatgcttagtttattctttttctggtttcttcaggtaaaatgttaggttattcatttgagatctttgttttctgatggaggcatttattgccatgaacttccattgctcttagaacgacttttactgcattccttaaggtttgctatgttgtttccatttttgtctcaagatatttttgattttattttttactttttaactatttttttaggttcagagatacatgtgcacgtttgttatataggtaaattgcatgtcacaggggtttaccatacagattatttcatcaccaggtaataagcatagtacccagaaggtagttttttgatcttcaccttccttccacccactaccctccagtaggccccaatatctgtggtttcagtcttcgtgtccatgtgttctcaatgtttagctcctactaataagtgagaatatgtggtatttgttttcctgttcatgcattagtgtgcttagcataatggcctccagctccatccatgtgactgcagaggacatgatcttgttcctttttacgcctgagcagtattccatggtgtacatataccacatttcctttatccagtgtaccattttctttattccatgtctttgctattgtgaatagtgctatgatgaacacacgcatgcatgtgtctttatggtaaaatggtttatattccttcaggtatatacccaataacgggactgctgggtcaaatgacaattctcttttaagttctttgagaagttgctaaactgcttgccacaatggctgaactaatttgaattattaccagcaggatataagtgttcccttttctttgcaacctcaccagcatctgttattttttgactttttgataatagcctttctgactgctgtgatgtagtatctcattatggttttgatatgcctttctctctaattattagtaatgttgagcattttttcttacacttgttggctcatgtttgtgttcttttgaaaagtgtctgtttatgccttttgtccattttttaatgggactgtttgtttttggcttgttgatttaaagttccttatagattctggatattagacatttgtcagatgtatagtttgcaaatattttcagccattctgtagattatctgttttttcagttgtttcttttgctgtgcagaagctctttggtttaattagatcccatttgtcaatttttgtttttgttgcaattgtttttggcatctttgtcatgaaacctttgctaaggcctatgtccagaatggtatttcctaggttttcttctagggtttttatagtttggggttttgcatttaaacctttaatccatcttgagttgatagtcgtacatgttgaaaggaaggggtccagtttcaatcttctgcatataactagccagttacccagcaccatttattaaacagtgttttcctcatttcctgtttttgtcaactttgtcaaatattagttggttgcaggtatgaggctttattttggggttctctgttctgttccattgatctatgtgtcttcttttttaaccagtaccatactgttttgattcctgtagccttgtagtataatttgaagtcaggtaatgtgatgcccctgggtttattctttttagttaggattgctttgactatttgggctgttttttgcttccatatgaattttacaattgttttttctaaatctgtgaaaaattacattgataatttgataggcattgcattgaatgtgtagattggcttgggcagtatggtcatcttaacgatattgattcttctaatccataagcatggaatgtttttccatttgcgttatctgtcattttctttcatcagtgttttatagttctacttataaagatatttcacctcctttgttaaatgtattcctaggtttctgtgtgtgtgtgtggctataataggctatgttaacctgataacaatttaactttcttgcataaaaaactctacacttttactccacataccgcccccccaaacacattttaaatttttgatgtcacacttacatctttttatattgcatatttcttaacaaattattgtacctagtattatttttaataattttatcttttaaccttcattctaaaataaaagtgatttgcatattaccatgaaaatattagacaggtaatgtgatgcccctgggtttattcattttagttaggattgctttgccaattgggctgttttttgcttccatatgaattttacaattgttttttctaattctctgaaaaattacattgataatttgataggtattgcactgaatgtgtagattggcttgggcagtatggtcatcttaacaatattgattcttctaatccataagcatggaatgtttttccatttgcgttatctgtcattttctttcatcagtgttttatagttctacttataaagatatttcacctcctttgttaaatgtattcctaggtttctgtgtgtgtgtgtggctataataggctattttaacctgataacaatttaagtttcttgcataaaaaactctacacttttactccacatactccacacacacacacgttttaaattttcgatgtcacacttacatctttttatattgcatatttcttaacaaattattgtacctagtattatttttaataattttgtcttttaaccttcattctaaaaagtgatttgcatattaccatgaaaatattagactactttaaattggactgtgtacttacttttactagtgagttttatactttcatatgtttttatgttactcattagcctccttttctttcagctaaagacctccctttagcagttcttgtaagataggtctgttggtgaggaatggttaatttaaatataacaaagtacaaaaagttcatcagtagagtttcaggtttcatttttccactaacctgtaagaatttatcatttgagttttagtctattgttaaacagaaatgttcacaattatgtgaaaagtttattaaaatattcctcattttcctcattatttatctgtgtgaggccaggttttattcatttacgaaaatagcacattctaatagatttaattcagaagcagttataaaaatacagtcatcttcctttaagtctgacattaaataaatttgcaaaaatgtaaaacagtatcactcttctcactctcttttttgttgtttgggaaagtacaataatttttatgaaaatatattatttaacaaaatcaatttattattttcagtttaaaaataaggattttaaaattttttcatttcaatttctaatactgtaaatagtgataggtataacccaactaaaccaaactctttaagattctcaaatttttaagagtgtaaaggagtcctgaaataaaaaagttaaacaacctagaaaaaaacaaagatataaatcagcatgttagcattcatcaattcagttaccatcatttcatccctaaaagccatggcatatagttacgtctcactgagccaccactttgaaactcccaccctgtgccaggtacttgtgagcatgtaactttgttaatcaactgttcagggctatatcccaacatggctttgttgcacttttcgtggcacctctgctaaatctcgttaggtagaccaaaggggtcagttaactttttctttataccttttattcatgatatttataagtttggtaatttacaaaggtcttggacaaagaccaggggcttatatataataatttatttatctcttgaagaaacaaacaatataattggttatgaagcacaggcgtcataagcagaaaacaggtttataggtaaagggggaagacctagtgtgtgtcgcttgcatcaggaattcatgttaccatttggcaatatgaatttgcttagcagtgtgcttttttttctcccccccacaggatcttgctctgtccccaggctagagtacagtggcccaatctcggctcactgcaacctccacctccagagttcaagtgattctcgtgcctcagactcctgagtagctaggattacaggcgcaagccaccacacccagctaatacagctaatttttgtatttttagtagagacagggtttcatcatgttggccagactggtctcgaactcctgacctcaggtcatctgccaacctcggcctcccaaagtgctgggattataggcatgagccactgtgcctggctgccctttttagtaaatacattttgcatgaccatgtggttgtttacagctatttatctagtaaaccaataacttacagctttttaaaggcttaatgaatagcatggaattattcatgatatctgtgccatatcttgaggacccactgtatacctgatattgcactggactttggaaatgaaaaataatgagtgatcttggggaatttacaatgtaacatagaaaggtgtgtatcactaaatttgcacaatgaaacataattaataatagaagaagtatattatctggcagaatagagtggggaaaagtaccagcaaagacttagaataccagctctcctcaatacttgcacttagacttggatgagaaacagttccccgcacaggcagatgacagggttaggtatgataggagccacgtaagtaggagccactcgaaatctgagtttggtgtggctggtgtggagggttgagggaatatgaagagaggaccacaacttgaatcactgagggcccttttttgatcctattagtgaaatctttaaagaaattgtattggtgacaataacagagaaataagggctttgaggatgaaaacataggctttaaaaaaaaaacttaagaaaaaaataataaagtaagttcagtattcagtgtcctgccttaaagaaagcattttaggcatgcaaatatcccatatattcagaggcttctataaaaaatacaaacaaaccctgtcatatacacatgaggcaaaaaaagatactttgtgagtagaaactattgaggtaaaagaaaaacttgttttagaagctgaaggcccagctgctgacttaataaaacaaattatgagaattttgtttatgcgaaaatccatgctgttgaaaacgcgagtgtttaaagttttctataaacaggaacaaggtgttctaccaaaaaaaagtataaaagcacattgaataactgctttgagtatttgacttggaggaaactaccatcactagttgagtatacctctttgatagcaatatgtgttaaaagtctaacagtctcactctacccctccccgagaaggtaaaggaatatcctgaccttaagggttgtgagacctagatgtttcttaccaaagaactccggtgacttttctttgcagattttaaatagcaaactattttatggtggctttaagccttccagagcaagcagattaggtatgtagttccttttaataaaagtatttggaagttcaataaaggcaattatgatttttctaggaccttttccaattctgtgattatgtgaatgactacccggaatttccatcaaacactgatatacaacttgctatggctacaatttattttggtgtgaaaacatgtttgcttttctgttcttatgtctcccttcatacaaaagtataatatcccagatatgtaggcatatagttctgccattcagagtaattctaatatactttaatcttattaactatctggaagactaatgcacagttatagctgcatttctttaagcaagtctatcatatctttgggtttatgccaaactaaatttgtgaactattatccatttacaaaatgattatttacatcaatcttcctttaaataacaaatgctcacaatgcattttaaaatattacctactttataaaaatccattctgaataaaaatgggagaatacctgtagtgttcattgcattgagttgttgactctttggccaatatgcgtttatattttgtcttgaaagatggaccctatattgacaacatcagttccagtgtactcattgaaagtggataaggaatatgaagtgcgtgtgagatccaaacaacgaaactctggaaattatggcgagttcagtgaggtgctctatgtaacacttcctcagatgagccaatttacatgtgaagaaggtaaaagaaataaaagattaaaatagtagctaacctggcttttgtcaatataacagttgattcacccctgcactggtagtgtgttgtccaaatcaaaatatattaacatcagatatcaggatgagagaccttgagctcactatctgtaacagatattgttcattgcaaaagcagaaggaagatttagtttccaaatttttcattcaggagaagtccggggggcaggtggaagtttagagacaggaatttggtggcaatctccggatggtagaattcagatgattcttttctttatatatttttatatttctgaaattttctatagtaagtttgttttgaatttataatcaggaaaaaaagctgtactgatggttagggaagaaagtatgtatctatatggatggatagatatgtgacatctaagaggaaacccaatattgagtcagcataggtagtcaacagcaggtgcatacggttttagaaagcggaggtgtggcttttacctagaggaatgcctaataagtagtgtggcagtcatacttaaaggagacgtggaacatttgaaaaccctatgtaggagaatcacaacaatgattaaagtttttaaaaatgggacctatgaatttagaataaaagaattaaaacttttagatacagaaataaagaaaactgattaatgatgagcagaaagtatagagtattattattctcaaatgggaaatggctctattccatcttcattgaaaacagaagtttacagggctatatgtttgttaatgaaacaaccacaagctacatagaaaataaatttatatttctgtatttactatacaggtagaatctcatgatactaaatagcattaggatgaaaatttctatagcaccattttctctatactctagttaactgaattcttgtttccaaactatttgatattatgcaattctggccttaaaagtacaatagctatacacccttaagcttagtgtagtggcatttaattcacttaacatatattttttaaactgccttttccttctgttactaacaaaaaagaagctctaactttatgttattttcctgaatatgtcattgatatgaaattatagacactacaagacaaaaaatgattttttctcccccaccaattctttaaaatgcttataatatctccctaggggattttaataactttttaaataagaaaagactatttcagcataaagacctacattttaaatggcaatgttaaggtaaatttcatctgtcatttttataaaaaagtggttagcctctgcctctgtggtaagaatactgggtaccaactgcaaagtagctggcaggtactcaatcttaaggaatgaaatagaagttttacaaacaggttcccccaagtctcatacaaagtatactaaaacctgaagatgggagcctcagtagtgatctttctgtcaattttatgtatataatatacatgagatatatttattatattttaataatttaatttattgatataaatacgtatatttatagctgtaaaatatatgttatttgtgtctaagaagtttctgtcatgatttatcaataaaaactctgccttcatctttttgataaatcttcaatctggaaactaagaaaatcaccacacttaaaaaaaaatagaaaagaaaccgagtgggcattatttaggtagtgtgttaataagcaacacttttttactgaagctgaaacctttatgatactccctggacacatagtatgcttaaagcagattgtttgttttcataaaacacacattgattttgaactatatgctgtttctttattttgaagtttttttttaatgtgaggagatttgaaaagtggacagagatgttcataaaacagaaaaaaactaagtcgttgcattctgtttcagtggttatcaagagaaatcactgactttattagatgaatacaaattatgaattttttgtgaaaagggaaagggaaatgtaaactgtgcttcaactattcgtaattctgaaagcgaaatattcttgtgtgtttcagatttctactttccatggctcttaattattatctttggaatatttgggctaacagtgatgctatttgtattcttattttctaaacagcaaaggtaggtgtggagtagtattctttggtattttgtaccagttgtttagatttccatatgtgtttctatttgttatttgatattttctttgtcaaattatgagtggaaattttagttaacctagtacacttttatctccagttatatatttaccattcatataaaactcaatttgttgtatttatcttagacaatttagaggtttagattctatctggagacttgtacaggacattaagaggcttaggctggtgactatgcataccttgtgatatgtacctctttatccaagagctagctctttccctcaagtcctcaacaagttgacccattcattccaggacttcaaagtatcactgagcctttggctgagtctgatacagtccttatatacagacaatttttttttttccttgagacggagtcttactctgttgcccaggctggagtgcaatggcgcaatcttggctcactgcaaccgccgccccccaggttcaagcaattctcctgcctcagcctccagagtagctgggattacaggcatgcgccaccaagcccagctaattttgtatttttagatacagtttcaccatgttggtcagactggtctcgaactcctgacctcaggtgatctgcccacctcagcctcccaaagcgctgggattacaggcgtgagctaccgcgcctggccccatttaaggtatttttaaagtcccaatggttaatcttgttgcttctcctagaattaaggtgactaacactcccaggttgcctagaactctcctggtttttagcaatgcaagtccggtgtgccaggaaatccctcagttccaggtaaccaagacagttgatccccttacctagaattgaaaatacgttctccagctgaagccaagaggcatctataaatcaaaatgagatctatgttaatatattttaaaagattttactttgttttgtaaggtagtatagcacttgtaaacttcaaaacagaattttgttaggaagaagaattattgggacgctagatttctatagtgtcaagcatgctaaaagtctaactgaatgcagaaagggttattttcagtagagcttcatgtccaattttataatataaaccaattggaaagtaaaattcattctgaattccattttgcacctaactttctggcaacattcctgttttccaaaaaagcagctatcataaatcacaacacaattttctattgtttcaggaaaataaataaatatatttttagaattttaatttgtgtatttaagtaatgccaacaacaaaaaagccaaattattctgttgattaatttcagtttattaatctatatatttggtgggaaaatttatacataacttcagtagataaactcacgaggtatgtaaagtaattagctcttagtattagctgtgaatttctagccattgtgaaggccaagtcaatttgttatgttgtttagttatattagttaacaatattaggaagaaaaaattatcctctcaaaaagtaggatttccaagaaaacatattacttctaatacagtgctttttataaataatgaaatgcttaactataatgtttagtcaaaatcaccaaattctacaattgatttgaaatctttattgttctcccaaatttcctgcactaaattgaattttctgtaggaaagaattaactttattttttatttgcccattaaaaacgcttatcattgtctaaatttgcatgttctactgaaagtgggaaatagtagcaaatatttgtcagcaagtatggacagaacatgtagttccaacaattaaattgatactgcaaagaacgagatttttcctagaactgtagggctgtaaagtggcgtcaggtcctacatgcctttgaaattttctgagtccacaattcattatccaacccacttcaccctgctttaatccagttaattgagtcaactctagcaaaatttataattttatttgtatctgatacaaaaccacaaacatagtttcaagtcaggctattattatactggttcctaccacacaaccctcccagcctttgagctgttaccaattgaggaaagaaataactgaatcagcctaaaatagaatttccaaaccagtagcgaaattcagcctacagattcatattttgttattttattttaattagttttgatttcagagtgaagattttcctacaaagtgtttgtaaaatagagaattttcacacaaaaatccagatttggggattatcttttaaaaaatgaaagatgtagtgaaactaaacaaggcagcatatgctgcagcagacaaccagctatcctatttgggattggctcacattctttaatttgccaccatcctcattcctcctaatgactttgcaactggcttgctttattcctctgcatgacctgcttgggcctcttagatttatgctctgccactgtggcataaggtcactacaaccactagaaaaccactagcgcatgcctgaatgcatcatcctatttaaaaaggaaaagcacacgtcacaaagtcaaacatcagccatttggaaacctttgcttcctgtaattagaattatgttccatctttttatgtttttgggaatttgaaataccaatttcgagatgcagaatcaaaaaaaaaaaaacaaaacagcgaaacagcagcatgacacaaagaacctgggttttgatttggagtcaggttctctgggtttgagccccaactgtgccaactatgaatgcatgatttgaacatgttgcttaattttccaagtttttgcacagatatatcatctgcctccctgggagtcataaggattaagtgaaatgtttagtgcaggggtcacaaacttatttcatagagttagagtacatttttaggcttttcaagccatacagtctctatcacagctactcaactctgccactgtagcacgaaagtggccataaacaaaatggaaatgaatgaagatgcttgtgttctcataaaattttatctacacaaacatgtgacaggccagatttggcccacagaccttaatttagtgacccatagtttagtgcaaagtatatcccacagtgtctgatttatcagaagcactaaaaaatgatagtagttattattaataatttgtattacttatttctatatctgtaattcatcagtaacaatatgctttaacatttgccccactgagtagtagaggctacttaatgcaatttataaaatggatttttgcttattacttggattaggtaaaatagcaagtggaaatactgagaaaatgtactccttatggaatggactggactgaccattcacactgagtggaatagtaactgatatccaaaaatctggttaccacctcttcatgacagtgtcatctctgaatagtcaggagttttttaaaaaattaaatgaattgtttggaataatctctgagcctttttccagtgctataatttgattttaaaaaataaactccaggccagatacaatggcttatagcatataaatccagcactttgggaggatggggcgggagtattgccctgaggccaggagttccagacagctcgggcaatgactagagcaagactccattacaaaaaatgaaacaacaaaaattagcacaccctgtagtcctagctacttaggaggctgaggcaagaatatcgcttggcccaggagtttgaggctgcagtgaattatgattgcaccactggactccagtgtgggcaatgaagtaagaccctgtctcaaaaagttttaaaaaaaattaaaaacaccataaattccaattacactattaattgtacaaaatagatacatgatttattcatttttatgaccaaaaaataatttaaagatttggaacaaaaaatgtaagtgcatcctagaattgtatatataaacccatactgattagttagagatagttaaaatttaatctgtcccatctgaaatgaaccctgtagtaaaaccctggttaataagatcatcttagataatttcataattaatatgaactatatggctaacctacccaagtctaccctttttcaagggtgtaagtaatcttggctccatgtggattgactcttttttctttctttcctgtacaaattactgatgagatgtacactagaattgccttatagctgaaatggaaatcagctttagatgaaattaaatttctttctttcaaatactaaatctggctgaaaataaaaagcattaagaaaaaaacaattgtgggaaaaccacattttcttttaatagacttcagatgaggctttttgggttttttagttgttcttttttttccttctacagtttttctttctcatttactgtctaatattttcttctgtttctcacactccaattatataaagtaccagaatatttggaaaaagtaatagtattgccaatattttatttctatcttttgctataattgagaatatgtagcttttaagatgtcaaaaccaaaattttatatgttttcaaggattaaaatgctgattctgcccccagttccagttccaaagattaaaggaatcgatccagatctcctcaaggtaactaataattttatctaaattgtagctagtactaattaacacctgaagactcctgtcatatgttgaaggttttctgtaagctatatatatcacattcaattttcttgtgtctcttctcctggagaaaatttttttaaatattctatttcttaaaaataagaaaacgtcatatgtatttaaaaagttacacactaatttatgtttttttatatgttttgttactgttgttcttattgtaaccataattaatctctgaacattatttgctaattcatttaattattatgagtttcttttcatagatcttcattttctttctattttctaggaaggaaaattagaggaggtgaacacaatcttagccattcatgatagctataaacccgaattccacagtgatgactcttgggttgaatttattgagctagatattgatgagccagatgaaaagactgaggaatcagacacagacagacttctaagcagtgaccatgagaaatcacatagtaacctaggggtgaaggatggcgactctggacgtaccagctgttgtgaacctgacattctggagactgatttcaatgccaatgacatacatgagggtacctcagaggttgctcagccacagaggttaaaaggggaagcagatctcttatgccttgaccagaagaatcaaaataactcaccttatcatgatgcttgccctgctactcagcagcccagtgttatccaagcagagaaaaacaaaccacaaccacttcctactgaaggagctgagtcaactcaccaagctgcccatattcagctaagcaatccaagttcactgtcaaacatcgacttttatgcccaggtgagcgacattacaccagcaggtagtgtggtcctttccccgggccaaaagaataaggcagggatgtcccaatgtgacatgcacccggaaatggtctcactctgccaagaaaacttccttatggacaatgcctacttctgtgaggcagatgccaaaaagtgcatccctgtggctcctcacatcaaggttgaatcacacatacagccaagcttaaaccaagaggacatttacatcaccacagaaagccttaccactgctgctgggaggcctgggacaggagaacatgttccaggttctgagatgcctgtcccagactatacctccattcatatagtacagtccccacagggcctcatactcaatgcgactgccttgcccttgcctgacaaagagtttctctcatcatgtggctatgtgagcacagaccaactgaacaaaatcatgccttagcctttctttggtttcccaagagctacgtatttaatagcaaagaattgactggggcaataacgtttaagccaaaacaatgtttaaaccttttttgggggagtgacaggatggggtatggattctaaaatgccttttcccaaaatgttgaaatatgatgttaaaaaaataagaagaatgcttaatcagatagatattcctattgtgcaatgtaaatattttaaagaattgtgtcagactgtttagtagcagtgattgtcttaatattgtgggtgttaatttttgatactaagcattgaatggctatgtttttaatgtatagtaaatcacgctttttgaaaaagcgaaaaaatcaggtggcttttgcggttcaggaaaattgaatgcaaaccatagcacaggctaattttttgttgtttcttaaataagaaacttttttatttaaaaaactaaaaactagaggtgagaaatttaaactataagcaagaaggcaaaaatagtttggatatgtaaaacatttattttgacataaagttgataaagattttttaataatttagacttcaagcatggctattttatattacactacacactgtgtactgcagttggtatgacccctctaaggagtgtagcaactacagtctaaagctggtttaatgttttggccaatgcacctaaagaaaaacaaactcgttttttacaaagcccttttatacctccccagactccttcaacaattctaaaatgattgtagtaatctgcattattggaatataattgttttatctgaatttttaaacaagtatttgttaatttagaaaactttaaagcgtttgcacagatcaacttaccaggcaccaaaagaagtaaaagcaaaaaagaaaacctttcttcaccaaatcttggttgatgccaaaaaaaaatacatgctaagagaagtagaaatcatagctggttcacactgaccaagatacttaagtgctgcaattgcacgcggagtgagttttttagtgcgtgcagatggtgagagataagatctatagcctctgcagcggaatctgttcacacccaacttggttttgctacataattatccaggaagggaataaggtacaagaagcattttgtaagttgaagcaaatcgaatgaaattaactgggtaatgaaacaaagagttcaagaaataagtttttgtttcacagcctataaccagacacatactcatttttcatgataatgaacagaacatagacagaagaaacaaggttttcagtccccacagataactgaaaattatttaaaccgctaaaagaaactttctttctcactaaatcttttataggatttatttaaaatagcaaaagaagaagtttcatcattttttacttcctctctgagtggactggcctcaaagcaagcattcagaagaaaaagaagcaacctcagtaatttagaaatcattttgcaatcccttaatatcctaaacatcattcatttttgttgttgttgttgttgttgagacagagtctcgctctgtcgccaggctagagtgcggtggcgcgatcttgactcactgcaatctccacctcccacaggttcaggcgattcccgtgcctcagcctcctgagtagctgggactacaggcacgcaccaccatgccaggctaatttttttgtattttagcagagacggggtttcaccatgttggccaggatggtctcgatctcctgacctcgtgatccacccgactcggcctcccaaagtgctgggattacaggtgtaagccaccgtgcccagccctaaacatcattcttgagagcattgggatatctcctgaaaaggtttatgaaaaagaagaatctcatctcagtgaagaatacttctcattttttaaaaaagcttaaaactttgaagttagctttaacttaaatagtatttcccatttatcgcagaccttttttaggaagcaagcttaatggctgataattttaaattctctctcttgcaggaaggactatgaaaagctagaattgagtgtttaaagttcaacatgttatttgtaatagatgtttgatagattttctgctactttgctgctatggttttctccaagagctacataatttagtttcatataaagtatcatcagtgtagaacctaattcaattcaaagctgtgtgtttggaagactatcttactatttcacaacagcctgacaacatttctatagccaaaaatagctaaatacctcaatcagtctcagaatgtcattttggtactttggtggccacataagccattattcactagtatgactagttgtgtctggcagtttatatttaactctctttatgtctgtggattttttccttcaaagtttaataaatttattttcttggattcctgatagtgtgcttctgttatcaaacaccaacataaaaatgatctaaaccactctgtatactgtgaattatcattgtaaggagagcttagcaccactggatcaaatacatcagcattgggtatggagatttttatgtgctgagatatagagagggaaacatatcccccttcccttattttttgagaagacaaaagcccaactcagaaatatcccactggcttggccctccccttaggctgtgactccccataggcaaaggttcatagagctgtgtatttgatgcatcatggaaaataaatgacatgggtgttggatgagggagagtgatatgtgagcattatctttacatttccagcttgagcatgttgtctggaaggaaggaaagcagctcttcctctgccattcacccattggcctaagtcagtttattggactagctgcttgttatcatgggaatcagctaataagtcaggcttgggaggaaggctgattaggtaagttgtgtaggagcctgagagagccatgaagtttagattcctacagcaggaggcaggatgcaggtgaggtagctgctgaaccctaggctcctgagcaggcactggattctgagatgtaggaatctggtgaggacattgataaacctactaaacaatgacgtattgcttcagcaagtcaaatgcaaagtgccacaactttttataatactcaagtgttatgttaaaaaaaaaaaatgtcttcacctgctgccctctgccctgtgagcagccattacctgaaagaaccatggagtgaagcctcagggcttcttcatatagatgctttaagatatgaggagtacagggaaaagaaagcctgcctacttccatggattgaaataacacaattctatttcagaagattaatggtgtgttgaaaatggctacacacatctttcagcatttcaatttctcaaagtttctactaacactttattcaagtgctataatatttacatatttacatatttgtataccaaaatatgtcttgttatgtgcttgttttagggtaagaaatagtgaccagaaaaaccagaagttacttaaatctaaactttttagtttggaatccaagatcccacataatttgccccagtctcctttgagagtttaaaatttaagacctagatgtaaagggcacagcttctgaataagaatttgatgtttggttaacattcaaactctattgctgtggaaatctaatgagcatatgatgtcagctatgttacacgggaaacattgctcatagtttaaatgatctctgactgataaatgacatctggatagggagaaactataaccacctggagataagttatactttggacttgagtgtagtgacttgtaattaagcatttcccctatagaaactctggaagctatgtttctggagatgtaacaagagtaactggctccagtgaggcatagagcttctaagcctgggagactcctttacctgcccaataccttctctgaatctgagctgccagttgtaggaggagaggaaggaaaagaccttctggatagctatataaacagctgtttagattgcttcatgcactgttatcattactgtgactctaaagcagaaagcctgatgctgtatcccttctgtcctacatccctctgagtagactggaaccaagtatggtgaatctggggaatgtgtggttgagcctaagaagatccccttgcatatgtagcaaaagacacttgccatttcttgaacaaagtttgtgctttcccatctctatgttcttggtcatgcctcctccttcaactaaaaagctcccacttaccaaccctgcctgtcaagattcccttcatccttcatggcccagctctaatgcctccttcatgaactctcctctgattcccaccatccaatcagtgattttttcttctgaaccatgtttaatggtgtttatcacattactttggtagctcacctgacaaacggctagtatagatttaccagtatgtacgctggtgaatatctatctccaaaatgcccttgaatggataattttgtggt

SEQ ID NO: 3 - DNA, 4414 bp, Homo sapien
ccgcgctctctgatcagaggcgaagctcggaggtcctacaggtatggatctctggcagctgctgttgaccttggcactggcaggatcaagtgatgctttttctggaagtgaggccacagcagctatccttagcagagcaccctggagtctgcaaagtgttaatccaggcctaaagacaaattcttctaaggagcctaaattcaccaagtgccgttcacctgagcgagagactttttcatgccactggacagatgaggttcatcatggtacaaagaacctaggacccatacagctgttctataccagaaggaacactcaagaatggactcaagaatggaaagaatgccctgattatgtttctgctggggaaaacagctgttactttaattcatcgtttacctccatctggataccttattgtatcaagctaactagcaatggtggtacagtggatgaaaagtgtttctctgttgatgaaatagtgcaaccagatccacccattgccctcaactggactttactgaacgtcagtttaactgggattcatgcagatatccaagtgagatgggaagcaccacgcaatgcagatattcagaaaggatggatggttctggagtatgaacttcaatacaaagaagtaaatgaaactaaatggaaaatgatggaccctatattgacaacatcagttccagtgtactcattgaaagtggataaggaatatgaagtgcgtgtgagatccaaacaacgaaactctggaaattatggcgagttcagtgaggtgctctatgtaacacttcctcagatgagccaatttacatgtgaagaagatttctactttccatggctcttaattattatctttggaatatttgggctaacagtgatgctatttgtattcttattttctaaacagcaaaggattaaaatgctgattctgcccccagttccagttccaaagattaaaggaatcgatccagatctcctcaaggaaggaaaattagaggaggtgaacacaatcttagccattcatgatagctataaacccgaattccacagtgatgactcttgggttgaatttattgagctagatattgatgagccagatgaaaagactgaggaatcagacacagacagacttctaagcagtgaccatgagaaatcacatagtaacctaggggtgaaggatggcgactctggacgtaccagctgttgtgaacctgacattctggagactgatttcaatgccaatgacatacatgagggtacctcagaggttgctcagccacagaggttaaaaggggaagcagatctcttatgccttgaccagaagaatcaaaataactcaccttatcatgatgcttgccctgctactcagcagcccagtgttatccaagcagagaaaaacaaaccacaaccacttcctactgaaggagctgagtcaactcaccaagctgcccatattcagctaagcaatccaagttcactgtcaaacatcgacttttatgcccaggtgagcgacattacaccagcaggtagtgtggtcctttccccgggccaaaagaataaggcagggatgtcccaatgtgacatgcacccggaaatggtctcactctgccaagaaaacttccttatggacaatgcctacttctgtgaggcagatgccaaaaagtgcatccctgtggctcctcacatcaaggttgaatcacacatacagccaagcttaaaccaagaggacatttacatcaccacagaaagccttaccactgctgctgggaggcctgggacaggagaacatgttccaggttctgagatgcctgtcccagactatacctccattcatatagtacagtccccacagggcctcatactcaatgcgactgccttgcccttgcctgacaaagagtttctctcatcatgtggctatgtgagcacagaccaactgaacaaaatcatgccttagcctttctttggtttcccaagagctacgtatttaatagcaaagaattgactggggcaataacgtttaagccaaaacaatgtttaaaccttttttgggggagtgacaggatggggtatggattctaaaatgccttttcccaaaatgttgaaatatgatgttaaaaaaataagaagaatgcttaatcagatagatattcctattgtgcaatgtaaatattttaaagaattgtgtcagactgtttagtagcagtgattgtcttaatattgtgggtgttaatttttgatactaagcattgaatggctatgtttttaatgtatagtaaatcacgctttttgaaaaagcgaaaaaatcaggtggcttttgcggttcaggaaaattgaatgcaaaccatagcacaggctaattttttgttgtttcttaaataagaaacttttttatttaaaaaactaaaaactagaggtgagaaatttaaactataagcaagaaggcaaaaatagtttggatatgtaaaacatttactttgacataaagttgataaagattttttaataatttagacttcaagcatggctattttatattacactacacactgtgtactgcagttggtatgacccctctaaggagtgtagcaactacagtctaaagctggtttaatgttttggccaatgcacctaaagaaaaacaaactcgttttttacaaagcccttttatacctccccagactccttcaacaattctaaaatgattgtagtaatctgcattattggaatataattgttttatctgaatttttaaacaagtatttgttaatttagaaaactttaaagcgtttgcacagatcaacttaccaggcaccaaaagaagtaaaagcaaaaaagaaaacctttcttcaccaaatcttggttgatgccaaaaaaaaatacatgctaagagaagtagaaatcatagctggttcacactgaccaagatacttaagtgctgcaattgcacgcggagtgagttttttagtgcgtgcagatggtgagagataagatctatagcctctgcagcggaatctgttcacacccaacttggttttgctacataattatccaggaagggaataaggtacaagaagcattttgtaagttgaagcaaatcgaatgaaattaactgggtaatgaaacaaagagttcaagaaataagtttttgtttcacagcctataaccagacacatactcatttttcatgataatgaacagaacatagacagaagaaacaaggttttcagtccccacagataactgaaaattatttaaaccgctaaaagaaactttctttctcactaaatcttttataggatttatttaaaatagcaaaagaagaagtttcatcattttttacttcctctctgagtggactggcctcaaagcaagcattcagaagaaaaagaagcaacctcagtaatttagaaatcattttgcaatcccttaatatcctaaacatcattcatttttgttgttgttgttgttgttgagacagagtctcgctctgtcgccaggctagagtgcggtggcgcgatcttgactcactgcaatctccacctcccacaggttcaggcgattcccgtgcctcagcctcctgagtagctgggactacaggcacgcaccaccatgccaggctaatttttttgtattttagcagagacggggtttcaccatgttggccaggatggtctcgagtctcctgacctcgtgatccacccgactcggcctcccaaagtgctgggattacaggtgtaagccaccgtgcccagccctaaacatcattcttgagagcattgggatatctcctgaaaaggtttatgaaaaagaagaatctcatctcagtgaagaatacttctcattttttaaaaaagcttaaaactttgaagttagctttaacttaaatagtatttcccatttatcgcagaccttttttaggaagcaagcttaatggctgataattttaaattctctctcttgcaggaaggactatgaaaagctagaattgagtgtttaaagttcaacatgttatttgtaatagatgtttgatagattttctgctactttgctgctatggttttctccaagagctacataatttagtttcatataaagtatcatcagtgtagaacctaattcaattcaaagctgtgtgtttggaagactatcttactatttcacaacagcctgacaacatttctatagccaaaaatagctaaatacctcaatcagtctcagaatgtcattttggtactttggtggccacataagccattattcactagtatgactagttgtgtctggcagtttatatttaactctctttatgtctgtggattttttccttcaaagtttaataaatttattttcttggattcctgataatgtgcttctgttatcaaacaccaacataaaaatgatctaaacc

SEQ ID NO: 4 - DNA, 459 bp, Homo sapien
  misc_feature (342)..(342): n is a, c, g, or t
tgtaatacgactactatagggcggccgcgaattcggcacgagcggcggcggcggcagcggcagcagcggctgctacagtggcggtggcggcggcggctgctgctgagcccgggcggcggcggggaccccgggctggggccacgcgggccggaggccccggcaccattggccccagcgcagacgcgaacccgcgctctctgatcagaggcgaagctcggaggtcctacaggtatggatctctggcagctgctgttgaccttggcactggcaggatcaagtgatgctttttctggaagtgaggccacagcagctatccttagcagagcaccctggagtctgcanagtgttaatccaggcctaaagacaaattcttctaaggagcctaaattcaccaagtgccgttcacctgagcgagagaacttttcatgccactggacagatgaagttcatcatggtaca

SEQ ID NO: 5 - DNA, 569 bp, Homo sapien
  misc_feature (148)..(148): n is a, c, g, or t
gttttgtgcgggccgcagccgcacgttggcaccgatggaactggggtcagtagagtgacagccaccagtccgcatgaactggggtcctacaggtatggatctctggcagctgctgttgaccttggcactggcaggatcaagtgatgcntttttctggaagtgaggccacagcagctatccttagcagagcaccctggagtctgcaaagtgttaatccaggcctaaagacaagatggggtccatgctcacatatcaagaaaatggagtcttacatgcaagcctaatgcagagtagagaagctcaccaacttgaaggaagcatgaatgaaattacaaggaaatctagcttagaaaaattaaccctgtagcttggtttttccactctttgctcttggcaaaaggatcttacgggaaaactggagcttagagaacttatgtaacattactagcaagttgcacagctgggattcaaactgaaatccagctagcttcaaagactgtgttctttctgctgctgcatactacccctacctaccaaggctctgagattagaaagcaggatgggtgtgt

SEQ ID NO: 6 - DNA, 421 bp, Homo sapien
gcgcgtgaacacagcgcgcagagcgcgcggtcttttgcgcgtttgtgcgggccgcagccgcacgttggcaccgatggaactggggtcagtagagtgacagccaccagtccgcatgaactgggttaaaatgagcaacttctttaaccagaactgaccttgaagacaaatggctaaaataaaacatttgctgaattcactgggcgcatcttacaagtaatttttggattctgcattgactacctacaagtgccttctgggtgcaagtccacaggcaagatttgttctgcaaatcttccatgaccaaggtcacctctttggattggcagacccagggagtccatattgggaagataaattcacacttcaccccttgttgagatctccagccttgctcctctgataaccaggtcctacaggtatg

SEQ ID NO: 7 - DNA, 434 bp, homo sapien
tgagatctccatccagccttgctcctctgataaccagtttttggcatctcagatgaggaagagtgatgggcgacaggtgatggtgacaactattaataagatctgaaagtaaacagtctcatgaaaggtggccaggagagggcagtcaccttttatcaggagcacagactgaatttgcaaagggtcctacaggtatggatctctggcagctgctgttgaccttggcactggcaggatcaagtgatgctttttctggaagtgaggctctgaaatacctacttccaagagaacgaaatttattcaagaaatgttggatggaaattgaagagtgagcttggaaacgagacacagagtggcaggagcccagaccaacctgtttatgaaagatgcctttgcccatagagggaaaaatacaccttaaaacctcaaaaaaa

SEQ ID NO: 8 - DNA, 2177 bp, Homo sapien
cgaagctcggaggtcctacaggtatggatctctggcagctgctgttgaccttggcactggcaggatcaagtgatgctttttctggaagtgaggccacagcagctatccttagcagagcaccctggagtctgcaaagtgttaatccaggcctaaagacaagaacactcaagaatggactcaagaatggaaagaatgccctgattatgtttctgctggggaaaacagctgttactttaattcatcgtttacctccatctggataccttattgtatcaagctaactagcaatggtggtacagtggatgaaaagtgtttctctgttgatgaaatagtgcaaccagatccacccattgccctcaactggactttactgaacgtcagtttaactgggattcatgcagatatccaagtgagatgggaagcaccacgcaatgcagatattcagaaagggtggatggttctggagtatgaacttcaatacaaagaagtaaatgaaactaaatggaaaatgatggaccctatattgacaacatcagttccagtgtactcattgaaagtggataaggaatatgaagtgcgtgtgagatccaaacaacgaaactctggaaattatggcgagttcagtgaggtgctctatgtaacacttcctcagatgagccaatttacatgtgaagaagatttctactttccatggctcttaattattatctttggaatatttgggctaacagtgatgctatttgtattcttattttctaaacagcaaaggattaaaatgctgattctgcccccagttccagttccaaagattaaaggaatcgatccagatctcctcaaggaaggaaaattagaggaggtgaacacaatcttagccattcatgatagctataaacccgaattccacagtgatgactcttgggttgaatttattgagctagatattgatgagccagatgaaaagactgaggaatcagacacagacagacttctaagcagtgaccatgagaaatcacatagtaacctaggggtgaaggatggcgactctggacgtaccagctgttgtgaacctgacattctggagactgatttcaatgccaatgacatacatgagggtacctcagaggttgctcagccacagaggttaaaaggggaagcagatctcttatgccttgaccagaagaatcaaaataactcaccttatcatgatgcttgccctgctactcagcagcccagtgttatccaagcagagaaaaacaaaccacaaccacttcctactgaaggagctgagtcaactcaccaagctgcccatattcagctaagcaatccaagttcactgtcaaacatcgacttttatgcccaggtgagcgacattacaccagcaggtagtgtggtcctttccccgggccaaaagaataaggcagggatgtcccaatgtgacatgcacccggaaatggtctcactctgccaagaaaacttccttatggacaatgcctacttctgtgaggcagatgccaaaaagtgcctccctgtggctcctcacatcaaggttgaatcacacatacagccaagcttaaaccaagaggacatttacatcaccacagaaagccttaccactgctgctgggaggcctgggacaggagaacatgttccaggttctgagatgcctgtcccagactatacctccattcatatagtacagtccccacagggcctcatactcaatgcgactgccttgcccttgcctgacaaagagtttctctcatcatgtggctatgtgagcacagaccaactgaacaaaatcatgccttagcctttctttggtttcccaagagctacgtatttaatagcaaagaattgactggggcaataacgtttaagccaaaacaatgtttaaaccttttttgggggagtgacaggatggggtatggattctaaaatgccttttcccaaaatgttgaaatatgatgttaaaaaaataagaagaatgcttaatcagatagatattcctattgtgcaatgtaaatattttaaagaattgtgtcagactgtttagtagcagtgattgtcttaatattgtgggtgttaatttttgatactaagcattgaatgactatgtttttaatgtatagtaaatcacgctttttgaaaaagcgaaaaaatcaggtggcttttgcggt

SEQ ID NO: 9 - DNA, 4529 bp, Homo sapien
ggagagactggggaggtcgagctgtgcgcgtggacacagcgcgcagagcgcgcggtcttttgcgcgtttgtgcgggccgcagccgcacgttggcaccgatggaactggggtcagtagagtgacagccaccagtccgcatgaactggggtcctacaggtatggatctctggcagctgctgttgaccttggcactggcaggatcaagtgatgctttttctggaagtgaggccacagcagctatccttagcagagcaccctggagtctgcaaagtgttaatccaggcctaaagacaaattcttctaaggagcctaaattcaccaagtgccgttcacctgagcgagagactttttcatgccactggacagatgaggttcatcatggtacaaagaacctaggacccatacagctgttctataccagaaggaacactcaagaatggactcaagaatggaaagaatgccctgattatgtttctgctggggaaaacagctgttactttaattcatcgtttacctccatctggataccttattgtatcaagctaactagcaatggtggtacagtggatgaaaagtgtttctctgttgatgaaatagtgcaaccagatccacccattgccctcaactggactttactgaacgtcagtttaactgggattcatgcagatatccaagtgagatgggaagcaccacgcaatgcagatattcagaaaggatggatggttctggagtatgaacttcaatacaaagaagtaaatgaaactaaatggaaaatgatggaccctatattgacaacatcagttccagtgtactcattgaaagtggataaggaatatgaagtgcgtgtgagatccaaacaacgaaactctggaaattatggcgagttcagtgaggtgctctatgtaacacttcctcagatgagccaatttacatgtgaagaagatttctactttccatggctcttaattattatctttggaatatttgggctaacagtgatgctatttgtattcttattttctaaacagcaaaggattaaaatgctgattctgcccccagttccagttccaaagattaaaggaatcgatccagatctcctcaaggaaggaaaattagaggaggtgaacacaatcttagccattcatgatagctataaacccgaattccacagtgatgactcttgggttgaatttattgagctagatattgatgagccagatgaaaagactgaggaatcagacacagacagacttctaagcagtgaccatgagaaatcacatagtaacctaggggtgaaggatggcgactctggacgtaccagctgttgtgaacctgacattctggagactgatttcaatgccaatgacatacatgagggtacctcagaggttgctcagccacagaggttaaaaggggaagcagatctcttatgccttgaccagaagaatcaaaataactcaccttatcatgatgcttgccctgctactcagcagcccagtgttatccaagcagagaaaaacaaaccacaaccacttcctactgaaggagctgagtcaactcaccaagctgcccatattcagctaagcaatccaagttcactgtcaaacatcgacttttatgcccaggtgagcgacattacaccagcaggtagtgtggtcctttccccgggccaaaagaataaggcagggatgtcccaatgtgacatgcacccggaaatggtctcactctgccaagaaaacttccttatggacaatgcctacttctgtgaggcagatgccaaaaagtgcatccctgtggctcctcacatcaaggttgaatcacacatacagccaagcttaaaccaagaggacatttacatcaccacagaaagccttaccactgctgctgggaggcctgggacaggagaacatgttccaggttctgagatgcctgtcccagactatacctccattcatatagtacagtccccacagggcctcatactcaatgcgactgccttgcccttgcctgacaaagagtttctctcatcatgtggctatgtgagcacagaccaactgaacaaaatcatgccttagcctttctttggtttcccaagagctacgtatttaatagcaaagaattgactggggcaataacgtttaagccaaaacaatgtttaaaccttttttgggggagtgacaggatggggtatggattctaaaatgccttttcccaaaatgttgaaatatgatgttaaaaaaataagaagaatgcttaatcagatagatattcctattgtgcaatgtaaatattttaaagaattgtgtcagactgtttagtagcagtgattgtcttaatattgtgggtgttaatttttgatactaagcattgaatggctatgtttttaatgtatagtaaatcacgctttttgaaaaagcgaaaaaatcaggtggcttttgcggttcaggaaaattgaatgcaaaccatagcacaggctaattttttgttgtttcttaaataagaaacttttttatttaaaaaactaaaaactagaggtgagaaatttaaactataagcaagaaggcaaaaatagtttggatatgtaaaacatttattttgacataaagttgataaagattttttaataatttagacttcaagcatggctattttatattacactacacactgtgtactgcagttggtatgacccctctaaggagtgtagcaactacagtctaaagctggtttaatgttttggccaatgcacctaaagaaaaacaaactcgttttttacaaagcccttttatacctccccagactccttcaacaattctaaaatgattgtagtaatctgcattattggaatataattgttttatctgaatttttaaacaagtatttgttaatttagaaaactttaaagcgtttgcacagatcaacttaccaggcaccaaaagaagtaaaagcaaaaaagaaaacctttcttcaccaaatcttggttgatgccaaaaaaaaatacatgctaagagaagtagaaatcatagctggttcacactgaccaagatacttaagtgctgcaattgcacgcggagtgagttttttagtgcgtgcagatggtgagagataagatctatagcctctgcagcggaatctgttcacacccaacttggttttgctacataattatccaggaagggaataaggtacaagaagcattttgtaagttgaagcaaatcgaatgaaattaactgggtaatgaaacaaagagttcaagaaataagtttttgtttcacagcctataaccagacacatactcatttttcatgataatgaacagaacatagacagaagaaacaaggttttcagtccccacagataactgaaaattatttaaaccgctaaaagaaactttctttctcactaaatcttttataggatttatttaaaatagcaaaagaagaagtttcatcattttttacttcctctctgagtggactggcctcaaagcaagcattcagaagaaaaagaagcaacctcagtaatttagaaatcattttgcaatcccttaatatcctaaacatcattcatttttgttgttgttgttgttgttgagacagagtctcgctctgtcgccaggctagagtgcggtggcgcgatcttgactcactgcaatctccacctcccacaggttcaggcgattcccgtgcctcagcctcctgagtagctgggactacaggcacgcaccaccatgccaggctaatttttttgtattttagcagagacggggtttcaccatgttggccaggatggtctcgatctcctgacctcgtgatccacccgactcggcctcccaaagtgctgggattacaggtgtaagccaccgtgcccagccctaaacatcattcttgagagcattgggatatctcctgaaaaggtttatgaaaaagaagaatctcatctcagtgaagaatacttctcattttttaaaaaagcttaaaactttgaagttagctttaacttaaatagtatttcccatttatcgcagaccttttttaggaagcaagcttaatggctgataattttaaattctctctcttgcaggaaggactatgaaaagctagaattgagtgtttaaagttcaacatgttatttgtaatagatgtttgatagattttctgctactttgctgctatggttttctccaagagctacataatttagtttcatataaagtatcatcagtgtagaacctaattcaattcaaagctgtgtgtttggaagactatcttactatttcacaacagcctgacaacatttctatagccaaaaatagctaaatacctcaatcagtctcagaatgtcattttggtactttggtggccacataagccattattcactagtatgactagttgtgtctggcagtttatatttaactctctttatgtctgtggattttttccttcaaagtttaataaatttattttcttggattcctgatagtgtgcttctgttatcaaacaccaacataaaaatgatctaaacca

SEQ ID NO: 10 - DNA, 4814 bp, Homo sapien
ggagagactggggaggtcgagctgtgcgcgtggacacagcgcgcagagcgcgcggtcttttgcgcgtttgtgcgggccgcagccgcacgttggcaccgatggaactggggtcagtagagtgacagccaccagtccgcatgaactgggttaaaatgagcaacttctttaaccagaactgaccttgaagacaaatggctaaaataaaacatttgctgaattcactgggcgcatcttacaagtaatttttggattctgcattgactacctacaagtgccttctgggtgcaagtccacaggcaagatttgttctgcaaatcttccatgaccaaggtcacctctttggattggcagacccagggagtccatattgggaagataaattcacacttcaccccttgttgagatctccagccttgctcctctgataaccaggtcctacaggtatggatctctggcagctgctgttgaccttggcactggcaggatcaagtgatgctttttctggaagtgaggccacagcagctatccttagcagagcaccctggagtctgcaaagtgttaatccaggcctaaagacaaattcttctaaggagcctaaattcaccaagtgccgttcacctgagcgagagactttttcatgccactggacagatgaggttcatcatggtacaaagaacctaggacccatacagctgttctataccagaaggaacactcaagaatggactcaagaatggaaagaatgccctgattatgtttctgctggggaaaacagctgttactttaattcatcgtttacctccatctggataccttattgtatcaagctaactagcaatggtggtacagtggatgaaaagtgtttctctgttgatgaaatagtgcaaccagatccacccattgccctcaactggactttactgaacgtcagtttaactgggattcatgcagatatccaagtgagatgggaagcaccacgcaatgcagatattcagaaaggatggatggttctggagtatgaacttcaatacaaagaagtaaatgaaactaaatggaaaatgatggaccctatattgacaacatcagttccagtgtactcattgaaagtggataaggaatatgaagtgcgtgtgagatccaaacaacgaaactctggaaattatggcgagttcagtgaggtgctctatgtaacacttcctcagatgagccaatttacatgtgaagaagatttctactttccatggctcttaattattatctttggaatatttgggctaacagtgatgctatttgtattcttattttctaaacagcaaaggattaaaatgctgattctgcccccagttccagttccaaagattaaaggaatcgatccagatctcctcaaggaaggaaaattagaggaggtgaacacaatcttagccattcatgatagctataaacccgaattccacagtgatgactcttgggttgaatttattgagctagatattgatgagccagatgaaaagactgaggaatcagacacagacagacttctaagcagtgaccatgagaaatcacatagtaacctaggggtgaaggatggcgactctggacgtaccagctgttgtgaacctgacattctggagactgatttcaatgccaatgacatacatgagggtacctcagaggttgctcagccacagaggttaaaaggggaagcagatctcttatgccttgaccagaagaatcaaaataactcaccttatcatgatgcttgccctgctactcagcagcccagtgttatccaagcagagaaaaacaaaccacaaccacttcctactgaaggagctgagtcaactcaccaagctgcccatattcagctaagcaatccaagttcactgtcaaacatcgacttttatgcccaggtgagcgacattacaccagcaggtagtgtggtcctttccccgggccaaaagaataaggcagggatgtcccaatgtgacatgcacccggaaatggtctcactctgccaagaaaacttccttatggacaatgcctacttctgtgaggcagatgccaaaaagtgcatccctgtggctcctcacatcaaggttgaatcacacatacagccaagcttaaaccaagaggacatttacatcaccacagaaagccttaccactgctgctgggaggcctgggacaggagaacatgttccaggttctgagatgcctgtcccagactatacctccattcatatagtacagtccccacagggcctcatactcaatgcgactgccttgcccttgcctgacaaagagtttctctcatcatgtggctatgtgagcacagaccaactgaacaaaatcatgccttagcctttctttggtttcccaagagctacgtatttaatagcaaagaattgactggggcaataacgtttaagccaaaacaatgtttaaaccttttttgggggagtgacaggatggggtatggattctaaaatgccttttcccaaaatgttgaaatatgatgttaaaaaaataagaagaatgcttaatcagatagatattcctattgtgcaatgtaaatattttaaagaattgtgtcagactgtttagtagcagtgattgtcttaatattgtgggtgttaatttttgatactaagcattgaatggctatgtttttaatgtatagtaaatcacgctttttgaaaaagcgaaaaaatcaggtggcttttgcggttcaggaaaattgaatgcaaaccatagcacaggctaattttttgttgtttcttaaataagaaacttttttatttaaaaaactaaaaactagaggtgagaaatttaaactataagcaagaaggcaaaaatagtttggatatgtaaaacatttattttgacataaagttgataaagattttttaataatttagacttcaagcatggctattttatattacactacacactgtgtactgcagttggtatgacccctctaaggagtgtagcaactacagtctaaagctggtttaatgttttggccaatgcacctaaagaaaaacaaactcgttttttacaaagcccttttatacctccccagactccttcaacaattctaaaatgattgtagtaatctgcattattggaatataattgttttatctgaatttttaaacaagtatttgttaatttagaaaactttaaagcgtttgcacagatcaacttaccaggcaccaaaagaagtaaaagcaaaaaagaaaacctttcttcaccaaatcttggttgatgccaaaaaaaaatacatgctaagagaagtagaaatcatagctggttcacactgaccaagatacttaagtgctgcaattgcacgcggagtgagttttttagtgcgtgcagatggtgagagataagatctatagcctctgcagcggaatctgttcacacccaacttggttttgctacataattatccaggaagggaataaggtacaagaagcattttgtaagttgaagcaaatcgaatgaaattaactgggtaatgaaacaaagagttcaagaaataagtttttgtttcacagcctataaccagacacatactcatttttcatgataatgaacagaacatagacagaagaaacaaggttttcagtccccacagataactgaaaattatttaaaccgctaaaagaaactttctttctcactaaatcttttataggatttatttaaaatagcaaaagaagaagtttcatcattttttacttcctctctgagtggactggcctcaaagcaagcattcagaagaaaaagaagcaacctcagtaatttagaaatcattttgcaatcccttaatatcctaaacatcattcatttttgttgttgttgttgttgttgagacagagtctcgctctgtcgccaggctagagtgcggtggcgcgatcttgactcactgcaatctccacctcccacaggttcaggcgattcccgtgcctcagcctcctgagtagctgggactacaggcacgcaccaccatgccaggctaatttttttgtattttagcagagacggggtttcaccatgttggccaggatggtctcgatctcctgacctcgtgatccacccgactcggcctcccaaagtgctgggattacaggtgtaagccaccgtgcccagccctaaacatcattcttgagagcattgggatatctcctgaaaaggtttatgaaaaagaagaatctcatctcagtgaagaatacttctcattttttaaaaaagcttaaaactttgaagttagctttaacttaaatagtatttcccatttatcgcagaccttttttaggaagcaagcttaatggctgataattttaaattctctctcttgcaggaaggactatgaaaagctagaattgagtgtttaaagttcaacatgttatttgtaatagatgtttgatagattttctgctactttgctgctatggttttctccaagagctacataatttagtttcatataaagtatcatcagtgtagaacctaattcaattcaaagctgtgtgtttggaagactatcttactatttcacaacagcctgacaacatttctatagccaaaaatagctaaatacctcaatcagtctcagaatgtcattttggtactttggtggccacataagccattattcactagtatgactagttgtgtctggcagtttatatttaactctctttatgtctgtggattttttccttcaaagtttaataaatttattttcttggattcctgatagtgtgcttctgttatcaaacaccaacataaaaatgatctaaacca

SEQ ID NO: 11 - DNA, 4522 bp, Homo sapien
gcctgtctgtttgtgccgccaggagaccttggaagggacagagaaagagctggggttttgccatgttgcccaggctgatctccaacacctgggatcaagcagtctgcccaccttggcctcccaaagtgctgaaattacaggtcctacaggtatggatctctggcagctgctgttgaccttggcactggcaggatcaagtgatgctttttctggaagtgaggccacagcagctatccttagcagagcaccctggagtctgcaaagtgttaatccaggcctaaagacaaattcttctaaggagcctaaattcaccaagtgccgttcacctgagcgagagactttttcatgccactggacagatgaggttcatcatggtacaaagaacctaggacccatacagctgttctataccagaaggaacactcaagaatggactcaagaatggaaagaatgccctgattatgtttctgctggggaaaacagctgttactttaattcatcgtttacctccatctggataccttattgtatcaagctaactagcaatggtggtacagtggatgaaaagtgtttctctgttgatgaaatagtgcaaccagatccacccattgccctcaactggactttactgaacgtcagtttaactgggattcatgcagatatccaagtgagatgggaagcaccacgcaatgcagatattcagaaaggatggatggttctggagtatgaacttcaatacaaagaagtaaatgaaactaaatggaaaatgatggaccctatattgacaacatcagttccagtgtactcattgaaagtggataaggaatatgaagtgcgtgtgagatccaaacaacgaaactctggaaattatggcgagttcagtgaggtgctctatgtaacacttcctcagatgagccaatttacatgtgaagaagatttctactttccatggctcttaattattatctttggaatatttgggctaacagtgatgctatttgtattcttattttctaaacagcaaaggattaaaatgctgattctgcccccagttccagttccaaagattaaaggaatcgatccagatctcctcaaggaaggaaaattagaggaggtgaacacaatcttagccattcatgatagctataaacccgaattccacagtgatgactcttgggttgaatttattgagctagatattgatgagccagatgaaaagactgaggaatcagacacagacagacttctaagcagtgaccatgagaaatcacatagtaacctaggggtgaaggatggcgactctggacgtaccagctgttgtgaacctgacattctggagactgatttcaatgccaatgacatacatgagggtacctcagaggttgctcagccacagaggttaaaaggggaagcagatctcttatgccttgaccagaagaatcaaaataactcaccttatcatgatgcttgccctgctactcagcagcccagtgttatccaagcagagaaaaacaaaccacaaccacttcctactgaaggagctgagtcaactcaccaagctgcccatattcagctaagcaatccaagttcactgtcaaacatcgacttttatgcccaggtgagcgacattacaccagcaggtagtgtggtcctttccccgggccaaaagaataaggcagggatgtcccaatgtgacatgcacccggaaatggtctcactctgccaagaaaacttccttatggacaatgcctacttctgtgaggcagatgccaaaaagtgcatccctgtggctcctcacatcaaggttgaatcacacatacagccaagcttaaaccaagaggacatttacatcaccacagaaagccttaccactgctgctgggaggcctgggacaggagaacatgttccaggttctgagatgcctgtcccagactatacctccattcatatagtacagtccccacagggcctcatactcaatgcgactgccttgcccttgcctgacaaagagtttctctcatcatgtggctatgtgagcacagaccaactgaacaaaatcatgccttagcctttctttggtttcccaagagctacgtatttaatagcaaagaattgactggggcaataacgtttaagccaaaacaatgtttaaaccttttttgggggagtgacaggatggggtatggattctaaaatgccttttcccaaaatgttgaaatatgatgttaaaaaaataagaagaatgcttaatcagatagatattcctattgtgcaatgtaaatattttaaagaattgtgtcagactgtttagtagcagtgattgtcttaatattgtgggtgttaatttttgatactaagcattgaatggctatgtttttaatgtatagtaaatcacgctttttgaaaaagcgaaaaaatcaggtggcttttgcggttcaggaaaattgaatgcaaaccatagcacaggctaattttttgttgtttcttaaataagaaacttttttatttaaaaaactaaaaactagaggtgagaaatttaaactataagcaagaaggcaaaaatagtttggatatgtaaaacatttattttgacataaagttgataaagattttttaataatttagacttcaagcatggctattttatattacactacacactgtgtactgcagttggtatgacccctctaaggagtgtagcaactacagtctaaagctggtttaatgttttggccaatgcacctaaagaaaaacaaactcgttttttacaaagcccttttatacctccccagactccttcaacaattctaaaatgattgtagtaatctgcattattggaatataattgttttatctgaatttttaaacaagtatttgttaatttagaaaactttaaagcgtttgcacagatcaacttaccaggcaccaaaagaagtaaaagcaaaaaagaaaacctttcttcaccaaatcttggttgatgccaaaaaaaaatacatgctaagagaagtagaaatcatagctggttcacactgaccaagatacttaagtgctgcaattgcacgcggagtgagttttttagtgcgtgcagatggtgagagataagatctatagcctctgcagcggaatctgttcacacccaacttggttttgctacataattatccaggaagggaataaggtacaagaagcattttgtaagttgaagcaaatcgaatgaaattaactgggtaatgaaacaaagagttcaagaaataagtttttgtttcacagcctataaccagacacatactcatttttcatgataatgaacagaacatagacagaagaaacaaggttttcagtccccacagataactgaaaattatttaaaccgctaaaagaaactttctttctcactaaatcttttataggatttatttaaaatagcaaaagaagaagtttcatcattttttacttcctctctgagtggactggcctcaaagcaagcattcagaagaaaaagaagcaacctcagtaatttagaaatcattttgcaatcccttaatatcctaaacatcattcatttttgttgttgttgttgttgttgagacagagtctcgctctgtcgccaggctagagtgcggtggcgcgatcttgactcactgcaatctccacctcccacaggttcaggcgattcccgtgcctcagcctcctgagtagctgggactacaggcacgcaccaccatgccaggctaatttttttgtattttagcagagacggggtttcaccatgttggccaggatggtctcgatctcctgacctcgtgatccacccgactcggcctcccaaagtgctgggattacaggtgtaagccaccgtgcccagccctaaacatcattcttgagagcattgggatatctcctgaaaaggtttatgaaaaagaagaatctcatctcagtgaagaatacttctcattttttaaaaaagcttaaaactttgaagttagctttaacttaaatagtatttcccatttatcgcagaccttttttaggaagcaagcttaatggctgataattttaaattctctctcttgcaggaaggactatgaaaagctagaattgagtgtttaaagttcaacatgttatttgtaatagatgtttgatagattttctgctactttgctgctatggttttctccaagagctacataatttagtttcatataaagtatcatcagtgtagaacctaattcaattcaaagctgtgtgtttggaagactatcttactatttcacaacagcctgacaacatttctatagccaaaaatagctaaatacctcaatcagtctcagaatgtcattttggtactttggtggccacataagccattattcactagtatgactagttgtgtctggcagtttatatttaactctctttatgtctgtggattttttccttcaaagtttaataaatttattttcttggattcctgatagtgtgcttctgttatcaaacaccaacataaaaatgatctaaacca

SEQ ID NO: 12 - DNA, 4491 bp, Homo sapien
cctcttctcagctgatttggctgcctccattgtaataggcctcatgagactccagcctaggcctggccttcagttcagcaggcagagcccagagatgtactgggcaaaggtcctacaggtatggatctctggcagctgctgttgaccttggcactggcaggatcaagtgatgctttttctggaagtgaggccacagcagctatccttagcagagcaccctggagtctgcaaagtgttaatccaggcctaaagacaaattcttctaaggagcctaaattcaccaagtgccgttcacctgagcgagagactttttcatgccactggacagatgaggttcatcatggtacaaagaacctaggacccatacagctgttctataccagaaggaacactcaagaatggactcaagaatggaaagaatgccctgattatgtttctgctggggaaaacagctgttactttaattcatcgtttacctccatctggataccttattgtatcaagctaactagcaatggtggtacagtggatgaaaagtgtttctctgttgatgaaatagtgcaaccagatccacccattgccctcaactggactttactgaacgtcagtttaactgggattcatgcagatatccaagtgagatgggaagcaccacgcaatgcagatattcagaaaggatggatggttctggagtatgaacttcaatacaaagaagtaaatgaaactaaatggaaaatgatggaccctatattgacaacatcagttccagtgtactcattgaaagtggataaggaatatgaagtgcgtgtgagatccaaacaacgaaactctggaaattatggcgagttcagtgaggtgctctatgtaacacttcctcagatgagccaatttacatgtgaagaagatttctactttccatggctcttaattattatctttggaatatttgggctaacagtgatgctatttgtattcttattttctaaacagcaaaggattaaaatgctgattctgcccccagttccagttccaaagattaaaggaatcgatccagatctcctcaaggaaggaaaattagaggaggtgaacacaatcttagccattcatgatagctataaacccgaattccacagtgatgactcttgggttgaatttattgagctagatattgatgagccagatgaaaagactgaggaatcagacacagacagacttctaagcagtgaccatgagaaatcacatagtaacctaggggtgaaggatggcgactctggacgtaccagctgttgtgaacctgacattctggagactgatttcaatgccaatgacatacatgagggtacctcagaggttgctcagccacagaggttaaaaggggaagcagatctcttatgccttgaccagaagaatcaaaataactcaccttatcatgatgcttgccctgctactcagcagcccagtgttatccaagcagagaaaaacaaaccacaaccacttcctactgaaggagctgagtcaactcaccaagctgcccatattcagctaagcaatccaagttcactgtcaaacatcgacttttatgcccaggtgagcgacattacaccagcaggtagtgtggtcctttccccgggccaaaagaataaggcagggatgtcccaatgtgacatgcacccggaaatggtctcactctgccaagaaaacttccttatggacaatgcctacttctgtgaggcagatgccaaaaagtgcatccctgtggctcctcacatcaaggttgaatcacacatacagccaagcttaaaccaagaggacatttacatcaccacagaaagccttaccactgctgctgggaggcctgggacaggagaacatgttccaggttctgagatgcctgtcccagactatacctccattcatatagtacagtccccacagggcctcatactcaatgcgactgccttgcccttgcctgacaaagagtttctctcatcatgtggctatgtgagcacagaccaactgaacaaaatcatgccttagcctttctttggtttcccaagagctacgtatttaatagcaaagaattgactggggcaataacgtttaagccaaaacaatgtttaaaccttttttgggggagtgacaggatggggtatggattctaaaatgccttttcccaaaatgttgaaatatgatgttaaaaaaataagaagaatgcttaatcagatagatattcctattgtgcaatgtaaatattttaaagaattgtgtcagactgtttagtagcagtgattgtcttaatattgtgggtgttaatttttgatactaagcattgaatggctatgtttttaatgtatagtaaatcacgctttttgaaaaagcgaaaaaatcaggtggcttttgcggttcaggaaaattgaatgcaaaccatagcacaggctaattttttgttgtttcttaaataagaaacttttttatttaaaaaactaaaaactagaggtgagaaatttaaactataagcaagaaggcaaaaatagtttggatatgtaaaacatttattttgacataaagttgataaagattttttaataatttagacttcaagcatggctattttatattacactacacactgtgtactgcagttggtatgacccctctaaggagtgtagcaactacagtctaaagctggtttaatgttttggccaatgcacctaaagaaaaacaaactcgttttttacaaagcccttttatacctccccagactccttcaacaattctaaaatgattgtagtaatctgcattattggaatataattgttttatctgaatttttaaacaagtatttgttaatttagaaaactttaaagcgtttgcacagatcaacttaccaggcaccaaaagaagtaaaagcaaaaaagaaaacctttcttcaccaaatcttggttgatgccaaaaaaaaatacatgctaagagaagtagaaatcatagctggttcacactgaccaagatacttaagtgctgcaattgcacgcggagtgagttttttagtgcgtgcagatggtgagagataagatctatagcctctgcagcggaatctgttcacacccaacttggttttgctacataattatccaggaagggaataaggtacaagaagcattttgtaagttgaagcaaatcgaatgaaattaactgggtaatgaaacaaagagttcaagaaataagtttttgtttcacagcctataaccagacacatactcatttttcatgataatgaacagaacatagacagaagaaacaaggttttcagtccccacagataactgaaaattatttaaaccgctaaaagaaactttctttctcactaaatcttttataggatttatttaaaatagcaaaagaagaagtttcatcattttttacttcctctctgagtggactggcctcaaagcaagcattcagaagaaaaagaagcaacctcagtaatttagaaatcattttgcaatcccttaatatcctaaacatcattcatttttgttgttgttgttgttgttgagacagagtctcgctctgtcgccaggctagagtgcggtggcgcgatcttgactcactgcaatctccacctcccacaggttcaggcgattcccgtgcctcagcctcctgagtagctgggactacaggcacgcaccaccatgccaggctaatttttttgtattttagcagagacggggtttcaccatgttggccaggatggtctcgatctcctgacctcgtgatccacccgactcggcctcccaaagtgctgggattacaggtgtaagccaccgtgcccagccctaaacatcattcttgagagcattgggatatctcctgaaaaggtttatgaaaaagaagaatctcatctcagtgaagaatacttctcattttttaaaaaagcttaaaactttgaagttagctttaacttaaatagtatttcccatttatcgcagaccttttttaggaagcaagcttaatggctgataattttaaattctctctcttgcaggaaggactatgaaaagctagaattgagtgtttaaagttcaacatgttatttgtaatagatgtttgatagattttctgctactttgctgctatggttttctccaagagctacataatttagtttcatataaagtatcatcagtgtagaacctaattcaattcaaagctgtgtgtttggaagactatcttactatttcacaacagcctgacaacatttctatagccaaaaatagctaaatacctcaatcagtctcagaatgtcattttggtactttggtggccacataagccattattcactagtatgactagttgtgtctggcagtttatatttaactctctttatgtctgtggattttttccttcaaagtttaataaatttattttcttggattcctgatagtgtgcttctgttatcaaacaccaacataaaaatgatctaaacca

SEQ ID NO: 13 - DNA, 4699 bp, Homo sapien
agatatgtgtgtgtgtgcatgagagagagagattgagaatgactgatttgggagggattttgtgaaggtttatatatcaaagcagaaagaccaagaatttagagattaatacatgccaagtggtaaccaagaaacttctgtgggatcccacctccaacccctccctctctgtcagattttaaccaaatcagtgtgatgtgatctgcttgcatatatgagtgaaagaaaaaggaaatttaaaaagttcttgatataaagcctggaggaaacaatacgaaaatccagcctctatttcagcaatatctgccggactattggtcctacaggtatggatctctggcagctgctgttgaccttggcactggcaggatcaagtgatgctttttctggaagtgaggccacagcagctatccttagcagagcaccctggagtctgcaaagtgttaatccaggcctaaagacaaattcttctaaggagcctaaattcaccaagtgccgttcacctgagcgagagactttttcatgccactggacagatgaggttcatcatggtacaaagaacctaggacccatacagctgttctataccagaaggaacactcaagaatggactcaagaatggaaagaatgccctgattatgtttctgctggggaaaacagctgttactttaattcatcgtttacctccatctggataccttattgtatcaagctaactagcaatggtggtacagtggatgaaaagtgtttctctgttgatgaaatagtgcaaccagatccacccattgccctcaactggactttactgaacgtcagtttaactgggattcatgcagatatccaagtgagatgggaagcaccacgcaatgcagatattcagaaaggatggatggttctggagtatgaacttcaatacaaagaagtaaatgaaactaaatggaaaatgatggaccctatattgacaacatcagttccagtgtactcattgaaagtggataaggaatatgaagtgcgtgtgagatccaaacaacgaaactctggaaattatggcgagttcagtgaggtgctctatgtaacacttcctcagatgagccaatttacatgtgaagaagatttctactttccatggctcttaattattatctttggaatatttgggctaacagtgatgctatttgtattcttattttctaaacagcaaaggattaaaatgctgattctgcccccagttccagttccaaagattaaaggaatcgatccagatctcctcaaggaaggaaaattagaggaggtgaacacaatcttagccattcatgatagctataaacccgaattccacagtgatgactcttgggttgaatttattgagctagatattgatgagccagatgaaaagactgaggaatcagacacagacagacttctaagcagtgaccatgagaaatcacatagtaacctaggggtgaaggatggcgactctggacgtaccagctgttgtgaacctgacattctggagactgatttcaatgccaatgacatacatgagggtacctcagaggttgctcagccacagaggttaaaaggggaagcagatctcttatgccttgaccagaagaatcaaaataactcaccttatcatgatgcttgccctgctactcagcagcccagtgttatccaagcagagaaaaacaaaccacaaccacttcctactgaaggagctgagtcaactcaccaagctgcccatattcagctaagcaatccaagttcactgtcaaacatcgacttttatgcccaggtgagcgacattacaccagcaggtagtgtggtcctttccccgggccaaaagaataaggcagggatgtcccaatgtgacatgcacccggaaatggtctcactctgccaagaaaacttccttatggacaatgcctacttctgtgaggcagatgccaaaaagtgcatccctgtggctcctcacatcaaggttgaatcacacatacagccaagcttaaaccaagaggacatttacatcaccacagaaagccttaccactgctgctgggaggcctgggacaggagaacatgttccaggttctgagatgcctgtcccagactatacctccattcatatagtacagtccccacagggcctcatactcaatgcgactgccttgcccttgcctgacaaagagtttctctcatcatgtggctatgtgagcacagaccaactgaacaaaatcatgccttagcctttctttggtttcccaagagctacgtatttaatagcaaagaattgactggggcaataacgtttaagccaaaacaatgtttaaaccttttttgggggagtgacaggatggggtatggattctaaaatgccttttcccaaaatgttgaaatatgatgttaaaaaaataagaagaatgcttaatcagatagatattcctattgtgcaatgtaaatattttaaagaattgtgtcagactgtttagtagcagtgattgtcttaatattgtgggtgttaatttttgatactaagcattgaatggctatgtttttaatgtatagtaaatcacgctttttgaaaaagcgaaaaaatcaggtggcttttgcggttcaggaaaattgaatgcaaaccatagcacaggctaattttttgttgtttcttaaataagaaacttttttatttaaaaaactaaaaactagaggtgagaaatttaaactataagcaagaaggcaaaaatagtttggatatgtaaaacatttattttgacataaagttgataaagattttttaataatttagacttcaagcatggctattttatattacactacacactgtgtactgcagttggtatgacccctctaaggagtgtagcaactacagtctaaagctggtttaatgttttggccaatgcacctaaagaaaaacaaactcgttttttacaaagcccttttatacctccccagactccttcaacaattctaaaatgattgtagtaatctgcattattggaatataattgttttatctgaatttttaaacaagtatttgttaatttagaaaactttaaagcgtttgcacagatcaacttaccaggcaccaaaagaagtaaaagcaaaaaagaaaacctttcttcaccaaatcttggttgatgccaaaaaaaaatacatgctaagagaagtagaaatcatagctggttcacactgaccaagatacttaagtgctgcaattgcacgcggagtgagttttttagtgcgtgcagatggtgagagataagatctatagcctctgcagcggaatctgttcacacccaacttggttttgctacataattatccaggaagggaataaggtacaagaagcattttgtaagttgaagcaaatcgaatgaaattaactgggtaatgaaacaaagagttcaagaaataagtttttgtttcacagcctataaccagacacatactcatttttcatgataatgaacagaacatagacagaagaaacaaggttttcagtccccacagataactgaaaattatttaaaccgctaaaagaaactttctttctcactaaatcttttataggatttatttaaaatagcaaaagaagaagtttcatcattttttacttcctctctgagtggactggcctcaaagcaagcattcagaagaaaaagaagcaacctcagtaatttagaaatcattttgcaatcccttaatatcctaaacatcattcatttttgttgttgttgttgttgttgagacagagtctcgctctgtcgccaggctagagtgcggtggcgcgatcttgactcactgcaatctccacctcccacaggttcaggcgattcccgtgcctcagcctcctgagtagctgggactacaggcacgcaccaccatgccaggctaatttttttgtattttagcagagacggggtttcaccatgttggccaggatggtctcgatctcctgacctcgtgatccacccgactcggcctcccaaagtgctgggattacaggtgtaagccaccgtgcccagccctaaacatcattcttgagagcattgggatatctcctgaaaaggtttatgaaaaagaagaatctcatctcagtgaagaatacttctcattttttaaaaaagcttaaaactttgaagttagctttaacttaaatagtatttcccatttatcgcagaccttttttaggaagcaagcttaatggctgataattttaaattctctctcttgcaggaaggactatgaaaagctagaattgagtgtttaaagttcaacatgttatttgtaatagatgtttgatagattttctgctactttgctgctatggttttctccaagagctacataatttagtttcatataaagtatcatcagtgtagaacctaattcaattcaaagctgtgtgtttggaagactatcttactatttcacaacagcctgacaacatttctatagccaaaaatagctaaatacctcaatcagtctcagaatgtcattttggtactttggtggccacataagccattattcactagtatgactagttgtgtctggcagtttatatttaactctctttatgtctgtggattttttccttcaaagtttaataaatttattttcttggattcctgatagtgtgcttctgttatcaaacaccaacataaaaatgatctaaacca

SEQ ID NO: 14 - DNA, 4524 bp, Homo sapien
ggggaatgagtagcaaagatggattaagtgagaagagtataggaggcagcagggccagaggtgtgaatagcccagaaccttctgagaagattcctttgtggacggaagaaaggggaggtttgtggaaatggtggaagataaggtcctacaggtatggatctctggcagctgctgttgaccttggcactggcaggatcaagtgatgctttttctggaagtgaggccacagcagctatccttagcagagcaccctggagtctgcaaagtgttaatccaggcctaaagacaaattcttctaaggagcctaaattcaccaagtgccgttcacctgagcgagagactttttcatgccactggacagatgaggttcatcatggtacaaagaacctaggacccatacagctgttctataccagaaggaacactcaagaatggactcaagaatggaaagaatgccctgattatgtttctgctggggaaaacagctgttactttaattcatcgtttacctccatctggataccttattgtatcaagctaactagcaatggtggtacagtggatgaaaagtgtttctctgttgatgaaatagtgcaaccagatccacccattgccctcaactggactttactgaacgtcagtttaactgggattcatgcagatatccaagtgagatgggaagcaccacgcaatgcagatattcagaaaggatggatggttctggagtatgaacttcaatacaaagaagtaaatgaaactaaatggaaaatgatggaccctatattgacaacatcagttccagtgtactcattgaaagtggataaggaatatgaagtgcgtgtgagatccaaacaacgaaactctggaaattatggcgagttcagtgaggtgctctatgtaacacttcctcagatgagccaatttacatgtgaagaagatttctactttccatggctcttaattattatctttggaatatttgggctaacagtgatgctatttgtattcttattttctaaacagcaaaggattaaaatgctgattctgcccccagttccagttccaaagattaaaggaatcgatccagatctcctcaaggaaggaaaattagaggaggtgaacacaatcttagccattcatgatagctataaacccgaattccacagtgatgactcttgggttgaatttattgagctagatattgatgagccagatgaaaagactgaggaatcagacacagacagacttctaagcagtgaccatgagaaatcacatagtaacctaggggtgaaggatggcgactctggacgtaccagctgttgtgaacctgacattctggagactgatttcaatgccaatgacatacatgagggtacctcagaggttgctcagccacagaggttaaaaggggaagcagatctcttatgccttgaccagaagaatcaaaataactcaccttatcatgatgcttgccctgctactcagcagcccagtgttatccaagcagagaaaaacaaaccacaaccacttcctactgaaggagctgagtcaactcaccaagctgcccatattcagctaagcaatccaagttcactgtcaaacatcgacttttatgcccaggtgagcgacattacaccagcaggtagtgtggtcctttccccgggccaaaagaataaggcagggatgtcccaatgtgacatgcacccggaaatggtctcactctgccaagaaaacttccttatggacaatgcctacttctgtgaggcagatgccaaaaagtgcatccctgtggctcctcacatcaaggttgaatcacacatacagccaagcttaaaccaagaggacatttacatcaccacagaaagccttaccactgctgctgggaggcctgggacaggagaacatgttccaggttctgagatgcctgtcccagactatacctccattcatatagtacagtccccacagggcctcatactcaatgcgactgccttgcccttgcctgacaaagagtttctctcatcatgtggctatgtgagcacagaccaactgaacaaaatcatgccttagcctttctttggtttcccaagagctacgtatttaatagcaaagaattgactggggcaataacgtttaagccaaaacaatgtttaaaccttttttgggggagtgacaggatggggtatggattctaaaatgccttttcccaaaatgttgaaatatgatgttaaaaaaataagaagaatgcttaatcagatagatattcctattgtgcaatgtaaatattttaaagaattgtgtcagactgtttagtagcagtgattgtcttaatattgtgggtgttaatttttgatactaagcattgaatggctatgtttttaatgtatagtaaatcacgctttttgaaaaagcgaaaaaatcaggtggcttttgcggttcaggaaaattgaatgcaaaccatagcacaggctaattttttgttgtttcttaaataagaaacttttttatttaaaaaactaaaaactagaggtgagaaatttaaactataagcaagaaggcaaaaatagtttggatatgtaaaacatttattttgacataaagttgataaagattttttaataatttagacttcaagcatggctattttatattacactacacactgtgtactgcagttggtatgacccctctaaggagtgtagcaactacagtctaaagctggtttaatgttttggccaatgcacctaaagaaaaacaaactcgttttttacaaagcccttttatacctccccagactccttcaacaattctaaaatgattgtagtaatctgcattattggaatataattgttttatctgaatttttaaacaagtatttgttaatttagaaaactttaaagcgtttgcacagatcaacttaccaggcaccaaaagaagtaaaagcaaaaaagaaaacctttcttcaccaaatcttggttgatgccaaaaaaaaatacatgctaagagaagtagaaatcatagctggttcacactgaccaagatacttaagtgctgcaattgcacgcggagtgagttttttagtgcgtgcagatggtgagagataagatctatagcctctgcagcggaatctgttcacacccaacttggttttgctacataattatccaggaagggaataaggtacaagaagcattttgtaagttgaagcaaatcgaatgaaattaactgggtaatgaaacaaagagttcaagaaataagtttttgtttcacagcctataaccagacacatactcatttttcatgataatgaacagaacatagacagaagaaacaaggttttcagtccccacagataactgaaaattatttaaaccgctaaaagaaactttctttctcactaaatcttttataggatttatttaaaatagcaaaagaagaagtttcatcattttttacttcctctctgagtggactggcctcaaagcaagcattcagaagaaaaagaagcaacctcagtaatttagaaatcattttgcaatcccttaatatcctaaacatcattcatttttgttgttgttgttgttgttgagacagagtctcgctctgtcgccaggctagagtgcggtggcgcgatcttgactcactgcaatctccacctcccacaggttcaggcgattcccgtgcctcagcctcctgagtagctgggactacaggcacgcaccaccatgccaggctaatttttttgtattttagcagagacggggtttcaccatgttggccaggatggtctcgatctcctgacctcgtgatccacccgactcggcctcccaaagtgctgggattacaggtgtaagccaccgtgcccagccctaaacatcattcttgagagcattgggatatctcctgaaaaggtttatgaaaaagaagaatctcatctcagtgaagaatacttctcattttttaaaaaagcttaaaactttgaagttagctttaacttaaatagtatttcccatttatcgcagaccttttttaggaagcaagcttaatggctgataattttaaattctctctcttgcaggaaggactatgaaaagctagaattgagtgtttaaagttcaacatgttatttgtaatagatgtttgatagattttctgctactttgctgctatggttttctccaagagctacataatttagtttcatataaagtatcatcagtgtagaacctaattcaattcaaagctgtgtgtttggaagactatcttactatttcacaacagcctgacaacatttctatagccaaaaatagctaaatacctcaatcagtctcagaatgtcattttggtactttggtggccacataagccattattcactagtatgactagttgtgtctggcagtttatatttaactctctttatgtctgtggattttttccttcaaagtttaataaatttattttcttggattcctgatagtgtgcttctgttatcaaacaccaacataaaaatgatctaaacca

SEQ ID NO: 15 - DNA, 4419 bp, Homo sapien
caatgatattagctatgacagcacgtatgagcctggggtcctacaggtatggatctctggcagctgctgttgaccttggcactggcaggatcaagtgatgctttttctggaagtgaggccacagcagctatccttagcagagcaccctggagtctgcaaagtgttaatccaggcctaaagacaaattcttctaaggagcctaaattcaccaagtgccgttcacctgagcgagagactttttcatgccactggacagatgaggttcatcatggtacaaagaacctaggacccatacagctgttctataccagaaggaacactcaagaatggactcaagaatggaaagaatgccctgattatgtttctgctggggaaaacagctgttactttaattcatcgtttacctccatctggataccttattgtatcaagctaactagcaatggtggtacagtggatgaaaagtgtttctctgttgatgaaatagtgcaaccagatccacccattgccctcaactggactttactgaacgtcagtttaactgggattcatgcagatatccaagtgagatgggaagcaccacgcaatgcagatattcagaaaggatggatggttctggagtatgaacttcaatacaaagaagtaaatgaaactaaatggaaaatgatggaccctatattgacaacatcagttccagtgtactcattgaaagtggataaggaatatgaagtgcgtgtgagatccaaacaacgaaactctggaaattatggcgagttcagtgaggtgctctatgtaacacttcctcagatgagccaatttacatgtgaagaagatttctactttccatggctcttaattattatctttggaatatttgggctaacagtgatgctatttgtattcttattttctaaacagcaaaggattaaaatgctgattctgcccccagttccagttccaaagattaaaggaatcgatccagatctcctcaaggaaggaaaattagaggaggtgaacacaatcttagccattcatgatagctataaacccgaattccacagtgatgactcttgggttgaatttattgagctagatattgatgagccagatgaaaagactgaggaatcagacacagacagacttctaagcagtgaccatgagaaatcacatagtaacctaggggtgaaggatggcgactctggacgtaccagctgttgtgaacctgacattctggagactgatttcaatgccaatgacatacatgagggtacctcagaggttgctcagccacagaggttaaaaggggaagcagatctcttatgccttgaccagaagaatcaaaataactcaccttatcatgatgcttgccctgctactcagcagcccagtgttatccaagcagagaaaaacaaaccacaaccacttcctactgaaggagctgagtcaactcaccaagctgcccatattcagctaagcaatccaagttcactgtcaaacatcgacttttatgcccaggtgagcgacattacaccagcaggtagtgtggtcctttccccgggccaaaagaataaggcagggatgtcccaatgtgacatgcacccggaaatggtctcactctgccaagaaaacttccttatggacaatgcctacttctgtgaggcagatgccaaaaagtgcatccctgtggctcctcacatcaaggttgaatcacacatacagccaagcttaaaccaagaggacatttacatcaccacagaaagccttaccactgctgctgggaggcctgggacaggagaacatgttccaggttctgagatgcctgtcccagactatacctccattcatatagtacagtccccacagggcctcatactcaatgcgactgccttgcccttgcctgacaaagagtttctctcatcatgtggctatgtgagcacagaccaactgaacaaaatcatgccttagcctttctttggtttcccaagagctacgtatttaatagcaaagaattgactggggcaataacgtttaagccaaaacaatgtttaaaccttttttgggggagtgacaggatggggtatggattctaaaatgccttttcccaaaatgttgaaatatgatgttaaaaaaataagaagaatgcttaatcagatagatattcctattgtgcaatgtaaatattttaaagaattgtgtcagactgtttagtagcagtgattgtcttaatattgtgggtgttaatttttgatactaagcattgaatggctatgtttttaatgtatagtaaatcacgctttttgaaaaagcgaaaaaatcaggtggcttttgcggttcaggaaaattgaatgcaaaccatagcacaggctaattttttgttgtttcttaaataagaaacttttttatttaaaaaactaaaaactagaggtgagaaatttaaactataagcaagaaggcaaaaatagtttggatatgtaaaacatttattttgacataaagttgataaagattttttaataatttagacttcaagcatggctattttatattacactacacactgtgtactgcagttggtatgacccctctaaggagtgtagcaactacagtctaaagctggtttaatgttttggccaatgcacctaaagaaaaacaaactcgttttttacaaagcccttttatacctccccagactccttcaacaattctaaaatgattgtagtaatctgcattattggaatataattgttttatctgaatttttaaacaagtatttgttaatttagaaaactttaaagcgtttgcacagatcaacttaccaggcaccaaaagaagtaaaagcaaaaaagaaaacctttcttcaccaaatcttggttgatgccaaaaaaaaatacatgctaagagaagtagaaatcatagctggttcacactgaccaagatacttaagtgctgcaattgcacgcggagtgagttttttagtgcgtgcagatggtgagagataagatctatagcctctgcagcggaatctgttcacacccaacttggttttgctacataattatccaggaagggaataaggtacaagaagcattttgtaagttgaagcaaatcgaatgaaattaactgggtaatgaaacaaagagttcaagaaataagtttttgtttcacagcctataaccagacacatactcatttttcatgataatgaacagaacatagacagaagaaacaaggttttcagtccccacagataactgaaaattatttaaaccgctaaaagaaactttctttctcactaaatcttttataggatttatttaaaatagcaaaagaagaagtttcatcattttttacttcctctctgagtggactggcctcaaagcaagcattcagaagaaaaagaagcaacctcagtaatttagaaatcattttgcaatcccttaatatcctaaacatcattcatttttgttgttgttgttgttgttgagacagagtctcgctctgtcgccaggctagagtgcggtggcgcgatcttgactcactgcaatctccacctcccacaggttcaggcgattcccgtgcctcagcctcctgagtagctgggactacaggcacgcaccaccatgccaggctaatttttttgtattttagcagagacggggtttcaccatgttggccaggatggtctcgatctcctgacctcgtgatccacccgactcggcctcccaaagtgctgggattacaggtgtaagccaccgtgcccagccctaaacatcattcttgagagcattgggatatctcctgaaaaggtttatgaaaaagaagaatctcatctcagtgaagaatacttctcattttttaaaaaagcttaaaactttgaagttagctttaacttaaatagtatttcccatttatcgcagaccttttttaggaagcaagcttaatggctgataattttaaattctctctcttgcaggaaggactatgaaaagctagaattgagtgtttaaagttcaacatgttatttgtaatagatgtttgatagattttctgctactttgctgctatggttttctccaagagctacataatttagtttcatataaagtatcatcagtgtagaacctaattcaattcaaagctgtgtgtttggaagactatcttactatttcacaacagcctgacaacatttctatagccaaaaatagctaaatacctcaatcagtctcagaatgtcattttggtactttggtggccacataagccattattcactagtatgactagttgtgtctggcagtttatatttaactctctttatgtctgtggattttttccttcaaagtttaataaatttattttcttggattcctgatagtgtgcttctgttatcaaacaccaacataaaaatgatctaaacca

SEQ ID NO: 16 - DNA, 4785 bp, Homo sapien
cctgtccagctcaaggccccatgctttctgatactgctgataaggttttctatttccagatcaaattaaagcaaaccttactggccctgttactgaagctgtgcatgggggtcgtttgctgtgaggtgtttctatggctttgagccagggtatgaacatctctagtgttcatgttatttcctgagactagcactcacgggaagtagaatttattacaacctgctgtttgagttcatgaaaagtaggacaatatgagactctggggcagtgaaagacttaccaggattccttctggaactgactcgtcagctcattcatgtcttacccagtctttaaacagtatttcatgataatggtctgcttttaattgctgggctttaccttaccctttttgtgattgcaggtcctacaggtatggatctctggcagctgctgttgaccttggcactggcaggatcaagtgatgctttttctggaagtgaggccacagcagctatccttagcagagcaccctggagtctgcaaagtgttaatccaggcctaaagacaaattcttctaaggagcctaaattcaccaagtgccgttcacctgagcgagagactttttcatgccactggacagatgaggttcatcatggtacaaagaacctaggacccatacagctgttctataccagaaggaacactcaagaatggactcaagaatggaaagaatgccctgattatgtttctgctggggaaaacagctgttactttaattcatcgtttacctccatctggataccttattgtatcaagctaactagcaatggtggtacagtggatgaaaagtgtttctctgttgatgaaatagtgcaaccagatccacccattgccctcaactggactttactgaacgtcagtttaactgggattcatgcagatatccaagtgagatgggaagcaccacgcaatgcagatattcagaaaggatggatggttctggagtatgaacttcaatacaaagaagtaaatgaaactaaatggaaaatgatggaccctatattgacaacatcagttccagtgtactcattgaaagtggataaggaatatgaagtgcgtgtgagatccaaacaacgaaactctggaaattatggcgagttcagtgaggtgctctatgtaacacttcctcagatgagccaatttacatgtgaagaagatttctactttccatggctcttaattattatctttggaatatttgggctaacagtgatgctatttgtattcttattttctaaacagcaaaggattaaaatgctgattctgcccccagttccagttccaaagattaaaggaatcgatccagatctcctcaaggaaggaaaattagaggaggtgaacacaatcttagccattcatgatagctataaacccgaattccacagtgatgactcttgggttgaatttattgagctagatattgatgagccagatgaaaagactgaggaatcagacacagacagacttctaagcagtgaccatgagaaatcacatagtaacctaggggtgaaggatggcgactctggacgtaccagctgttgtgaacctgacattctggagactgatttcaatgccaatgacatacatgagggtacctcagaggttgctcagccacagaggttaaaaggggaagcagatctcttatgccttgaccagaagaatcaaaataactcaccttatcatgatgcttgccctgctactcagcagcccagtgttatccaagcagagaaaaacaaaccacaaccacttcctactgaaggagctgagtcaactcaccaagctgcccatattcagctaagcaatccaagttcactgtcaaacatcgacttttatgcccaggtgagcgacattacaccagcaggtagtgtggtcctttccccgggccaaaagaataaggcagggatgtcccaatgtgacatgcacccggaaatggtctcactctgccaagaaaacttccttatggacaatgcctacttctgtgaggcagatgccaaaaagtgcatccctgtggctcctcacatcaaggttgaatcacacatacagccaagcttaaaccaagaggacatttacatcaccacagaaagccttaccactgctgctgggaggcctgggacaggagaacatgttccaggttctgagatgcctgtcccagactatacctccattcatatagtacagtccccacagggcctcatactcaatgcgactgccttgcccttgcctgacaaagagtttctctcatcatgtggctatgtgagcacagaccaactgaacaaaatcatgccttagcctttctttggtttcccaagagctacgtatttaatagcaaagaattgactggggcaataacgtttaagccaaaacaatgtttaaaccttttttgggggagtgacaggatggggtatggattctaaaatgccttttcccaaaatgttgaaatatgatgttaaaaaaataagaagaatgcttaatcagatagatattcctattgtgcaatgtaaatattttaaagaattgtgtcagactgtttagtagcagtgattgtcttaatattgtgggtgttaatttttgatactaagcattgaatggctatgtttttaatgtatagtaaatcacgctttttgaaaaagcgaaaaaatcaggtggcttttgcggttcaggaaaattgaatgcaaaccatagcacaggctaattttttgttgtttcttaaataagaaacttttttatttaaaaaactaaaaactagaggtgagaaatttaaactataagcaagaaggcaaaaatagtttggatatgtaaaacatttattttgacataaagttgataaagattttttaataatttagacttcaagcatggctattttatattacactacacactgtgtactgcagttggtatgacccctctaaggagtgtagcaactacagtctaaagctggtttaatgttttggccaatgcacctaaagaaaaacaaactcgttttttacaaagcccttttatacctccccagactccttcaacaattctaaaatgattgtagtaatctgcattattggaatataattgttttatctgaatttttaaacaagtatttgttaatttagaaaactttaaagcgtttgcacagatcaacttaccaggcaccaaaagaagtaaaagcaaaaaagaaaacctttcttcaccaaatcttggttgatgccaaaaaaaaatacatgctaagagaagtagaaatcatagctggttcacactgaccaagatacttaagtgctgcaattgcacgcggagtgagttttttagtgcgtgcagatggtgagagataagatctatagcctctgcagcggaatctgttcacacccaacttggttttgctacataattatccaggaagggaataaggtacaagaagcattttgtaagttgaagcaaatcgaatgaaattaactgggtaatgaaacaaagagttcaagaaataagtttttgtttcacagcctataaccagacacatactcatttttcatgataatgaacagaacatagacagaagaaacaaggttttcagtccccacagataactgaaaattatttaaaccgctaaaagaaactttctttctcactaaatcttttataggatttatttaaaatagcaaaagaagaagtttcatcattttttacttcctctctgagtggactggcctcaaagcaagcattcagaagaaaaagaagcaacctcagtaatttagaaatcattttgcaatcccttaatatcctaaacatcattcatttttgttgttgttgttgttgttgagacagagtctcgctctgtcgccaggctagagtgcggtggcgcgatcttgactcactgcaatctccacctcccacaggttcaggcgattcccgtgcctcagcctcctgagtagctgggactacaggcacgcaccaccatgccaggctaatttttttgtattttagcagagacggggtttcaccatgttggccaggatggtctcgatctcctgacctcgtgatccacccgactcggcctcccaaagtgctgggattacaggtgtaagccaccgtgcccagccctaaacatcattcttgagagcattgggatatctcctgaaaaggtttatgaaaaagaagaatctcatctcagtgaagaatacttctcattttttaaaaaagcttaaaactttgaagttagctttaacttaaatagtatttcccatttatcgcagaccttttttaggaagcaagcttaatggctgataattttaaattctctctcttgcaggaaggactatgaaaagctagaattgagtgtttaaagttcaacatgttatttgtaatagatgtttgatagattttctgctactttgctgctatggttttctccaagagctacataatttagtttcatataaagtatcatcagtgtagaacctaattcaattcaaagctgtgtgtttggaagactatcttactatttcacaacagcctgacaacatttctatagccaaaaatagctaaatacctcaatcagtctcagaatgtcattttggtactttggtggccacataagccattattcactagtatgactagttgtgtctggcagtttatatttaactctctttatgtctgtggattttttccttcaaagtttaataaatttattttcttggattcctgatagtgtgcttctgttatcaaacaccaacataaaaatgatctaaacca

SEQ ID NO: 17 - DNA, 4316 bp, Homo sapien
gtcctacaggtatggatctctggcagctgctgttgaccttggcactggcaggatcaagtgatgctttttctggaagtgaggattcttctaaggagcctaaattcaccaagtgccgttcacctgagcgagagactttttcatgccactggacagatgaggttcatcatggtacaaagaacctaggacccatacagctgttctataccagaaggaacactcaagaatggactcaagaatggaaagaatgccctgattatgtttctgctggggaaaacagctgttactttaattcatcgtttacctccatctggataccttattgtatcaagctaactagcaatggtggtacagtggatgaaaagtgtttctctgttgatgaaatagtgcaaccagatccacccattgccctcaactggactttactgaacgtcagtttaactgggattcatgcagatatccaagtgagatgggaagcaccacgcaatgcagatattcagaaaggatggatggttctggagtatgaacttcaatacaaagaagtaaatgaaactaaatggaaaatgatggaccctatattgacaacatcagttccagtgtactcattgaaagtggataaggaatatgaagtgcgtgtgagatccaaacaacgaaactctggaaattatggcgagttcagtgaggtgctctatgtaacacttcctcagatgagccaatttacatgtgaagaagatttctactttccatggctcttaattattatctttggaatatttgggctaacagtgatgctatttgtattcttattttctaaacagcaaaggattaaaatgctgattctgcccccagttccagttccaaagattaaaggaatcgatccagatctcctcaaggaaggaaaattagaggaggtgaacacaatcttagccattcatgatagctataaacccgaattccacagtgatgactcttgggttgaatttattgagctagatattgatgagccagatgaaaagactgaggaatcagacacagacagacttctaagcagtgaccatgagaaatcacatagtaacctaggggtgaaggatggcgactctggacgtaccagctgttgtgaacctgacattctggagactgatttcaatgccaatgacatacatgagggtacctcagaggttgctcagccacagaggttaaaaggggaagcagatctcttatgccttgaccagaagaatcaaaataactcaccttatcatgatgcttgccctgctactcagcagcccagtgttatccaagcagagaaaaacaaaccacaaccacttcctactgaaggagctgagtcaactcaccaagctgcccatattcagctaagcaatccaagttcactgtcaaacatcgacttttatgcccaggtgagcgacattacaccagcaggtagtgtggtcctttccccgggccaaaagaataaggcagggatgtcccaatgtgacatgcacccggaaatggtctcactctgccaagaaaacttccttatggacaatgcctacttctgtgaggcagatgccaaaaagtgcatccctgtggctcctcacatcaaggttgaatcacacatacagccaagcttaaaccaagaggacatttacatcaccacagaaagccttaccactgctgctgggaggcctgggacaggagaacatgttccaggttctgagatgcctgtcccagactatacctccattcatatagtacagtccccacagggcctcatactcaatgcgactgccttgcccttgcctgacaaagagtttctctcatcatgtggctatgtgagcacagaccaactgaacaaaatcatgccttagcctttctttggtttcccaagagctacgtatttaatagcaaagaattgactggggcaataacgtttaagccaaaacaatgtttaaaccttttttgggggagtgacaggatggggtatggattctaaaatgccttttcccaaaatgttgaaatatgatgttaaaaaaataagaagaatgcttaatcagatagatattcctattgtgcaatgtaaatattttaaagaattgtgtcagactgtttagtagcagtgattgtcttaatattgtgggtgttaatttttgatactaagcattgaatggctatgtttttaatgtatagtaaatcacgctttttgaaaaagcgaaaaaatcaggtggcttttgcggttcaggaaaattgaatgcaaaccatagcacaggctaattttttgttgtttcttaaataagaaacttttttatttaaaaaactaaaaactagaggtgagaaatttaaactataagcaagaaggcaaaaatagtttggatatgtaaaacatttattttgacataaagttgataaagattttttaataatttagacttcaagcatggctattttatattacactacacactgtgtactgcagttggtatgacccctctaaggagtgtagcaactacagtctaaagctggtttaatgttttggccaatgcacctaaagaaaaacaaactcgttttttacaaagcccttttatacctccccagactccttcaacaattctaaaatgattgtagtaatctgcattattggaatataattgttttatctgaatttttaaacaagtatttgttaatttagaaaactttaaagcgtttgcacagatcaacttaccaggcaccaaaagaagtaaaagcaaaaaagaaaacctttcttcaccaaatcttggttgatgccaaaaaaaaatacatgctaagagaagtagaaatcatagctggttcacactgaccaagatacttaagtgctgcaattgcacgcggagtgagttttttagtgcgtgcagatggtgagagataagatctatagcctctgcagcggaatctgttcacacccaacttggttttgctacataattatccaggaagggaataaggtacaagaagcattttgtaagttgaagcaaatcgaatgaaattaactgggtaatgaaacaaagagttcaagaaataagtttttgtttcacagcctataaccagacacatactcatttttcatgataatgaacagaacatagacagaagaaacaaggttttcagtccccacagataactgaaaattatttaaaccgctaaaagaaactttctttctcactaaatcttttataggatttatttaaaatagcaaaagaagaagtttcatcattttttacttcctctctgagtggactggcctcaaagcaagcattcagaagaaaaagaagcaacctcagtaatttagaaatcattttgcaatcccttaatatcctaaacatcattcatttttgttgttgttgttgttgttgagacagagtctcgctctgtcgccaggctagagtgcggtggcgcgatcttgactcactgcaatctccacctcccacaggttcaggcgattcccgtgcctcagcctcctgagtagctgggactacaggcacgcaccaccatgccaggctaatttttttgtattttagcagagacggggtttcaccatgttggccaggatggtctcgatctcctgacctcgtgatccacccgactcggcctcccaaagtgctgggattacaggtgtaagccaccgtgcccagccctaaacatcattcttgagagcattgggatatctcctgaaaaggtttatgaaaaagaagaatctcatctcagtgaagaatacttctcattttttaaaaaagcttaaaactttgaagttagctttaacttaaatagtatttcccatttatcgcagaccttttttaggaagcaagcttaatggctgataattttaaattctctctcttgcaggaaggactatgaaaagctagaattgagtgtttaaagttcaacatgttatttgtaatagatgtttgatagattttctgctactttgctgctatggttttctccaagagctacataatttagtttcatataaagtatcatcagtgtagaacctaattcaattcaaagctgtgtgtttggaagactatcttactatttcacaacagcctgacaacatttctatagccaaaaatagctaaatacctcaatcagtctcagaatgtcattttggtactttggtggccacataagccattattcactagtatgactagttgtgtctggcagtttatatttaactctctttatgtctgtggattttttccttcaaagtttaataaatttattttcttggattcctgatagtgtgcttctgttatcaaacaccaacataaaaatgatctaaacca

SEQ ID NO: 18 - DNA, 4356 bp, Homo sapien
gtcctacaggtatggatctctggcagctgctgttgaccttggcactggcaggatcaagtgatgctttttctggaagtgaggccacagcagctatccttagcagagcaccctggagtctgcaaagtgttaatccaggcctaaagacaaattcttctaaggagcctaaattcaccaagtgccgttcacctgagcgagagactttttcatgccactggacagatgaggttcatcatggtacaaagaacctaggacccatacagctgttctataccagaaggaacactcaagaatggactcaagaatggaaagaatgccctgattatgtttctgctggggaaaacagctgttactttaattcatcgtttacctccatctggataccttattgtatcaagctaactagcaatggtggtacagtggatgaaaagtgtttctctgttgatgaaatagtgcaaccagatccacccattgccctcaactggactttactgaacgtcagtttaactgggattcatgcagatatccaagtgagatgggaagcaccacgcaatgcagatattcagaaaggatggatggttctggagtatgaacttcaatacaaagaagtaaatgaaactaaatggaaaatgatggaccctatattgacaacatcagttccagtgtactcattgaaagtggataaggaatatgaagtgcgtgtgagatccaaacaacgaaactctggaaattatggcgagttcagtgaggtgctctatgtaacacttcctcagatgagccaatttacatgtgaagaagatttctactttccatggctcttaattattatctttggaatatttgggctaacagtgatgctatttgtattcttattttctaaacagcaaagttccagttccaaagattaaaggaatcgatccagatctcctcaaggaaggaaaattagaggaggtgaacacaatcttagccattcatgatagctataaacccgaattccacagtgatgactcttgggttgaatttattgagctagatattgatgagccagatgaaaagactgaggaatcagacacagacagacttctaagcagtgaccatgagaaatcacatagtaacctaggggtgaaggatggcgactctggacgtaccagctgttgtgaacctgacattctggagactgatttcaatgccaatgacatacatgagggtacctcagaggttgctcagccacagaggttaaaaggggaagcagatctcttatgccttgaccagaagaatcaaaataactcaccttatcatgatgcttgccctgctactcagcagcccagtgttatccaagcagagaaaaacaaaccacaaccacttcctactgaaggagctgagtcaactcaccaagctgcccatattcagctaagcaatccaagttcactgtcaaacatcgacttttatgcccaggtgagcgacattacaccagcaggtagtgtggtcctttccccgggccaaaagaataaggcagggatgtcccaatgtgacatgcacccggaaatggtctcactctgccaagaaaacttccttatggacaatgcctacttctgtgaggcagatgccaaaaagtgcatccctgtggctcctcacatcaaggttgaatcacacatacagccaagcttaaaccaagaggacatttacatcaccacagaaagccttaccactgctgctgggaggcctgggacaggagaacatgttccaggttctgagatgcctgtcccagactatacctccattcatatagtacagtccccacagggcctcatactcaatgcgactgccttgcccttgcctgacaaagagtttctctcatcatgtggctatgtgagcacagaccaactgaacaaaatcatgccttagcctttctttggtttcccaagagctacgtatttaatagcaaagaattgactggggcaataacgtttaagccaaaacaatgtttaaaccttttttgggggagtgacaggatggggtatggattctaaaatgccttttcccaaaatgttgaaatatgatgttaaaaaaataagaagaatgcttaatcagatagatattcctattgtgcaatgtaaatattttaaagaattgtgtcagactgtttagtagcagtgattgtcttaatattgtgggtgttaatttttgatactaagcattgaatggctatgtttttaatgtatagtaaatcacgctttttgaaaaagcgaaaaaatcaggtggcttttgcggttcaggaaaattgaatgcaaaccatagcacaggctaattttttgttgtttcttaaataagaaacttttttatttaaaaaactaaaaactagaggtgagaaatttaaactataagcaagaaggcaaaaatagtttggatatgtaaaacatttattttgacataaagttgataaagattttttaataatttagacttcaagcatggctattttatattacactacacactgtgtactgcagttggtatgacccctctaaggagtgtagcaactacagtctaaagctggtttaatgttttggccaatgcacctaaagaaaaacaaactcgttttttacaaagcccttttatacctccccagactccttcaacaattctaaaatgattgtagtaatctgcattattggaatataattgttttatctgaatttttaaacaagtatttgttaatttagaaaactttaaagcgtttgcacagatcaacttaccaggcaccaaaagaagtaaaagcaaaaaagaaaacctttcttcaccaaatcttggttgatgccaaaaaaaaatacatgctaagagaagtagaaatcatagctggttcacactgaccaagatacttaagtgctgcaattgcacgcggagtgagttttttagtgcgtgcagatggtgagagataagatctatagcctctgcagcggaatctgttcacacccaacttggttttgctacataattatccaggaagggaataaggtacaagaagcattttgtaagttgaagcaaatcgaatgaaattaactgggtaatgaaacaaagagttcaagaaataagtttttgtttcacagcctataaccagacacatactcatttttcatgataatgaacagaacatagacagaagaaacaaggttttcagtccccacagataactgaaaattatttaaaccgctaaaagaaactttctttctcactaaatcttttataggatttatttaaaatagcaaaagaagaagtttcatcattttttacttcctctctgagtggactggcctcaaagcaagcattcagaagaaaaagaagcaacctcagtaatttagaaatcattttgcaatcccttaatatcctaaacatcattcatttttgttgttgttgttgttgttgagacagagtctcgctctgtcgccaggctagagtgcggtggcgcgatcttgactcactgcaatctccacctcccacaggttcaggcgattcccgtgcctcagcctcctgagtagctgggactacaggcacgcaccaccatgccaggctaatttttttgtattttagcagagacggggtttcaccatgttggccaggatggtctcgatctcctgacctcgtgatccacccgactcggcctcccaaagtgctgggattacaggtgtaagccaccgtgcccagccctaaacatcattcttgagagcattgggatatctcctgaaaaggtttatgaaaaagaagaatctcatctcagtgaagaatacttctcattttttaaaaaagcttaaaactttgaagttagctttaacttaaatagtatttcccatttatcgcagaccttttttaggaagcaagcttaatggctgataattttaaattctctctcttgcaggaaggactatgaaaagctagaattgagtgtttaaagttcaacatgttatttgtaatagatgtttgatagattttctgctactttgctgctatggttttctccaagagctacataatttagtttcatataaagtatcatcagtgtagaacctaattcaattcaaagctgtgtgtttggaagactatcttactatttcacaacagcctgacaacatttctatagccaaaaatagctaaatacctcaatcagtctcagaatgtcattttggtactttggtggccacataagccattattcactagtatgactagttgtgtctggcagtttatatttaactctctttatgtctgtggattttttccttcaaagtttaataaatttattttcttggattcctgatagtgtgcttctgttatcaaacaccaacataaaaatgatctaaacca

SEQ ID NO: 19 - DNA, 4312 bp, Homo sapien
gtcctacaggtatggatctctggcagctgctgttgaccttggcactggcaggatcaagtgatgctttttctggaagtgaggccacagcagctatccttagcagagcaccctggagtctgcaaagtgttaatccaggcctaaagacaaattcttctaaggagcctaaattcaccaagtgccgttcacctgagcgagagactttttcatgccactggacagatgaggttcatcatggtacaaagaacctaggacccatacagctgttctataccagaaggaacactcaagaatggactcaagaatggaaagaatgccctgattatgtttctgctggggaaaacagctgttactttaattcatcgtttacctccatctggataccttattgtatcaagctaactagcaatggtggtacagtggatgaaaagtgtttctctgttgatgaaatagtgcaaccagatccacccattgccctcaactggactttactgaacgtcagtttaactgggattcatgcagatatccaagtgagatgggaagcaccacgcaatgcagatattcagaaaggatggatggttctggagtatgaacttcaatacaaagaagtaaatgaaactaaatggaaaatgatggaccctatattgacaacatcagttccagtgtactcattgaaagtggataaggaatatgaagtgcgtgtgagatccaaacaacgaaactctggaaattatggcgagttcagtgaggtgctctatgtaacacttcctcagatgagccaatttacatgtgaagaagatttctactttccatggctcttaattattatctttggaatatttgggctaacagtgatgctatttgtattcttattttctaaacagcaaaggaaggaaaattagaggaggtgaacacaatcttagccattcatgatagctataaacccgaattccacagtgatgactcttgggttgaatttattgagctagatattgatgagccagatgaaaagactgaggaatcagacacagacagacttctaagcagtgaccatgagaaatcacatagtaacctaggggtgaaggatggcgactctggacgtaccagctgttgtgaacctgacattctggagactgatttcaatgccaatgacatacatgagggtacctcagaggttgctcagccacagaggttaaaaggggaagcagatctcttatgccttgaccagaagaatcaaaataactcaccttatcatgatgcttgccctgctactcagcagcccagtgttatccaagcagagaaaaacaaaccacaaccacttcctactgaaggagctgagtcaactcaccaagctgcccatattcagctaagcaatccaagttcactgtcaaacatcgacttttatgcccaggtgagcgacattacaccagcaggtagtgtggtcctttccccgggccaaaagaataaggcagggatgtcccaatgtgacatgcacccggaaatggtctcactctgccaagaaaacttccttatggacaatgcctacttctgtgaggcagatgccaaaaagtgcatccctgtggctcctcacatcaaggttgaatcacacatacagccaagcttaaaccaagaggacatttacatcaccacagaaagccttaccactgctgctgggaggcctgggacaggagaacatgttccaggttctgagatgcctgtcccagactatacctccattcatatagtacagtccccacagggcctcatactcaatgcgactgccttgcccttgcctgacaaagagtttctctcatcatgtggctatgtgagcacagaccaactgaacaaaatcatgccttagcctttctttggtttcccaagagctacgtatttaatagcaaagaattgactggggcaataacgtttaagccaaaacaatgtttaaaccttttttgggggagtgacaggatggggtatggattctaaaatgccttttcccaaaatgttgaaatatgatgttaaaaaaataagaagaatgcttaatcagatagatattcctattgtgcaatgtaaatattttaaagaattgtgtcagactgtttagtagcagtgattgtcttaatattgtgggtgttaatttttgatactaagcattgaatggctatgtttttaatgtatagtaaatcacgctttttgaaaaagcgaaaaaatcaggtggcttttgcggttcaggaaaattgaatgcaaaccatagcacaggctaattttttgttgtttcttaaataagaaacttttttatttaaaaaactaaaaactagaggtgagaaatttaaactataagcaagaaggcaaaaatagtttggatatgtaaaacatttattttgacataaagttgataaagattttttaataatttagacttcaagcatggctattttatattacactacacactgtgtactgcagttggtatgacccctctaaggagtgtagcaactacagtctaaagctggtttaatgttttggccaatgcacctaaagaaaaacaaactcgttttttacaaagcccttttatacctccccagactccttcaacaattctaaaatgattgtagtaatctgcattattggaatataattgttttatctgaatttttaaacaagtatttgttaatttagaaaactttaaagcgtttgcacagatcaacttaccaggcaccaaaagaagtaaaagcaaaaaagaaaacctttcttcaccaaatcttggttgatgccaaaaaaaaatacatgctaagagaagtagaaatcatagctggttcacactgaccaagatacttaagtgctgcaattgcacgcggagtgagttttttagtgcgtgcagatggtgagagataagatctatagcctctgcagcggaatctgttcacacccaacttggttttgctacataattatccaggaagggaataaggtacaagaagcattttgtaagttgaagcaaatcgaatgaaattaactgggtaatgaaacaaagagttcaagaaataagtttttgtttcacagcctataaccagacacatactcatttttcatgataatgaacagaacatagacagaagaaacaaggttttcagtccccacagataactgaaaattatttaaaccgctaaaagaaactttctttctcactaaatcttttataggatttatttaaaatagcaaaagaagaagtttcatcattttttacttcctctctgagtggactggcctcaaagcaagcattcagaagaaaaagaagcaacctcagtaatttagaaatcattttgcaatcccttaatatcctaaacatcattcatttttgttgttgttgttgttgttgagacagagtctcgctctgtcgccaggctagagtgcggtggcgcgatcttgactcactgcaatctccacctcccacaggttcaggcgattcccgtgcctcagcctcctgagtagctgggactacaggcacgcaccaccatgccaggctaatttttttgtattttagcagagacggggtttcaccatgttggccaggatggtctcgatctcctgacctcgtgatccacccgactcggcctcccaaagtgctgggattacaggtgtaagccaccgtgcccagccctaaacatcattcttgagagcattgggatatctcctgaaaaggtttatgaaaaagaagaatctcatctcagtgaagaatacttctcattttttaaaaaagcttaaaactttgaagttagctttaacttaaatagtatttcccatttatcgcagaccttttttaggaagcaagcttaatggctgataattttaaattctctctcttgcaggaaggactatgaaaagctagaattgagtgtttaaagttcaacatgttatttgtaatagatgtttgatagattttctgctactttgctgctatggttttctccaagagctacataatttagtttcatataaagtatcatcagtgtagaacctaattcaattcaaagctgtgtgtttggaagactatcttactatttcacaacagcctgacaacatttctatagccaaaaatagctaaatacctcaatcagtctcagaatgtcattttggtactttggtggccacataagccattattcactagtatgactagttgtgtctggcagtttatatttaactctctttatgtctgtggattttttccttcaaagtttaataaatttattttcttggattcctgatagtgtgcttctgttatcaaacaccaacataaaaatgatctaaacca

SEQ ID NO: 20 - DNA, 20 bp, Artificial sequence
  Synthetic oligonucleotide
acctccgagcttcgcctctg

SEQ ID NO: 21 - DNA, 20 bp, Artificial sequence
  Synthetic oligonucleotide
ctgtaggacctccgagcttc

SEQ ID NO: 22 - DNA, 20 bp, Artificial sequence
  Synthetic oligonucleotide
tccatacctgtaggacctcc

SEQ ID NO: 23 - DNA, 20 bp, Artificial sequence
  Synthetic oligonucleotide
tgccaaggtcaacagcagct

SEQ ID NO: 24 - DNA, 20 bp, Artificial sequence
  Synthetic oligonucleotide
ctgccagtgccaaggtcaac

SEQ ID NO: 25 - DNA, 20 bp, Artificial sequence
  Synthetic oligonucleotide
cttgatcctgccagtgccaa

SEQ ID NO: 26 - DNA, 20 bp, Artificial sequence
  Synthetic oligonucleotide
agcatcacttgatcctgcca

SEQ ID NO: 27 - DNA, 20 bp, Artificial sequence
  Synthetic oligonucleotide
cagaaaaagcatcacttgat

SEQ ID NO: 28 - DNA, 20 bp, Artificial sequence
  Synthetic oligonucleotide
tcacttccagaaaaagcatc

SEQ ID NO: 29 - DNA, 20 bp, Artificial sequence
  Synthetic oligonucleotide
gtctctcgctcaggtgaacg

SEQ ID NO: 30 - DNA, 20 bp, Artificial sequence
  Synthetic oligonucleotide
tgaaaaagtctctcgctcag

SEQ ID NO: 31 - DNA, 20 bp, Artificial sequence
  Synthetic oligonucleotide
agtggcatgaaaaagtctct

SEQ ID NO: 32 - DNA, 20 bp, Artificial sequence
  Synthetic oligonucleotide
tctgtccagtggcatgaaaa

SEQ ID NO: 33 - DNA, 20 bp, Artificial sequence
  Synthetic oligonucleotide
ggatctggttgcactatttc

SEQ ID NO: 34 - DNA, 20 bp, Artificial sequence
  Synthetic oligonucleotide
aatgggtggatctggttgca

SEQ ID NO: 35 - DNA, 20 bp, Artificial sequence
  Synthetic oligonucleotide
agtccagttgagggcaatgg

SEQ ID NO: 36 - DNA, 20 bp, Artificial sequence
  Synthetic oligonucleotide
tcagtaaagtccagttgagg

SEQ ID NO: 37 - DNA, 20 bp, Artificial sequence
  Synthetic oligonucleotide
gaatcccagttaaactgacg

SEQ ID NO: 38 - DNA, 20 bp, Artificial sequence
  Synthetic oligonucleotide
tctgcatgaatcccagttaa

SEQ ID NO: 39 - DNA, 20 bp, Artificial sequence
  Synthetic oligonucleotide
atccatcctttctgaatatc

SEQ ID NO: 40 - DNA, 20 bp, Artificial sequence
  Synthetic oligonucleotide
cagaaccatccatcctttct

SEQ ID NO: 41 - DNA, 20 bp, Artificial sequence
  Synthetic oligonucleotide
catactccagaaccatccat

SEQ ID NO: 42 - DNA, 20 bp, Artificial sequence
  Synthetic oligonucleotide
tgaagttcatactccagaac

SEQ ID NO: 43 - DNA, 20 bp, Artificial sequence
  Synthetic oligonucleotide
tttgtattgaagttcatact

SEQ ID NO: 44 - DNA, 20 bp, Artificial sequence
  Synthetic oligonucleotide
ttacttctttgtattgaagt

SEQ ID NO: 45 - DNA, 20 bp, Artificial sequence
  Synthetic oligonucleotide
gtttcatttacttctttgta

SEQ ID NO: 46 - DNA, 20 bp, Artificial sequence
  Synthetic oligonucleotide
ccatttagtttcatttactt

SEQ ID NO: 47 - DNA, 20 bp, Artificial sequence
  Synthetic oligonucleotide
tcattttccatttagtttca

SEQ ID NO: 48 - DNA, 20 bp, Artificial sequence
  Synthetic oligonucleotide
acacgcacttcatattcctt

SEQ ID NO: 49 - DNA, 20 bp, Artificial sequence
  Synthetic oligonucleotide
ggatctcacacgcacttcat

SEQ ID NO: 50 - DNA, 20 bp, Artificial sequence
  Synthetic oligonucleotide
aagtgttacatagagcacct

SEQ ID NO: 51 - DNA, 20 bp, Artificial sequence
  Synthetic oligonucleotide
tctgaggaagtgttacatag

SEQ ID NO: 52 - DNA, 20 bp, Artificial sequence
  Synthetic oligonucleotide
cttcttcacatgtaaattgg

SEQ ID NO: 53 - DNA, 20 bp, Artificial sequence
  Synthetic oligonucleotide
tagaaatcttcttcacatgt

SEQ ID NO: 54 - DNA, 20 bp, Artificial sequence
  Synthetic oligonucleotide
tggaaagtagaaatcttctt

SEQ ID NO: 55 - DNA, 20 bp, Artificial sequence
  Synthetic oligonucleotide
agagccatggaaagtagaaa

SEQ ID NO: 56 - DNA, 20 bp, Artificial sequence
  Synthetic oligonucleotide
ataattaagagccatggaaa

SEQ ID NO: 57 - DNA, 20 bp, Artificial sequence
  Synthetic oligonucleotide
cagttggtctgtgctcacat

SEQ ID NO: 58 - DNA, 20 bp, Artificial sequence
  Synthetic oligonucleotide
gtgccaaggtcaacagcagc

SEQ ID NO: 59 - DNA, 20 bp, Artificial sequence
  Synthetic oligonucleotide
agtgccaaggtcaacagcag

SEQ ID NO: 60 - DNA, 20 bp, Artificial sequence
  Synthetic oligonucleotide
catcacttgatcctgccagt

SEQ ID NO: 61 - DNA, 20 bp, Artificial sequence
  Synthetic oligonucleotide
gcatcacttgatcctgccag

SEQ ID NO: 62 - DNA, 20 bp, Artificial sequence
  Synthetic oligonucleotide
aagcatcacttgatcctgcc

SEQ ID NO: 63 - DNA, 20 bp, Artificial sequence
  Synthetic oligonucleotide
aaagcatcacttgatcctgc

SEQ ID NO: 64 - DNA, 20 bp, Artificial sequence
  Synthetic oligonucleotide
atctcacacgcacttcatat

SEQ ID NO: 65 - DNA, 20 bp, Artificial sequence
  Synthetic oligonucleotide
gatctcacacgcacttcata

SEQ ID NO: 66 - DNA, 20 bp, Artificial sequence
  Synthetic oligonucleotide
tggatctcacacgcacttca

SEQ ID NO: 67 - DNA, 20 bp, Artificial sequence
  Synthetic oligonucleotide
ttggatctcacacgcacttc

SEQ ID NO: 68 - DNA, 20 bp, Artificial sequence
  Synthetic oligonucleotide
tccagaatgtcaggttcaca

SEQ ID NO: 69 - DNA, 20 bp, Artificial sequence
  Synthetic oligonucleotide
ctccagaatgtcaggttcac

SEQ ID NO: 70 - DNA, 20 bp, Artificial sequence
  Synthetic oligonucleotide
gtctccagaatgtcaggttc

SEQ ID NO: 71 - DNA, 20 bp, Artificial sequence
  Synthetic oligonucleotide
agtctccagaatgtcaggtt

SEQ ID NO: 72 - DNA, 20 bp, Artificial sequence
  Synthetic oligonucleotide
gcttggataacactgggctg

SEQ ID NO: 73 - DNA, 20 bp, Artificial sequence
  Synthetic oligonucleotide
tgcttggataacactgggct

SEQ ID NO: 74 - DNA, 20 bp, Artificial sequence
  Synthetic oligonucleotide
tctgcttggataacactggg

SEQ ID NO: 75 - DNA, 20 bp, Artificial sequence
  Synthetic oligonucleotide
ctctgcttggataacactgg

SEQ ID NO: 76 - DNA, 20 bp, Artificial sequence
  Synthetic oligonucleotide
tctctgcttggataacactg

SEQ ID NO: 77 - DNA, 20 bp, Artificial sequence
  Synthetic oligonucleotide
cagagtgagaccatttccgg

SEQ ID NO: 78 - DNA, 20 bp, Artificial sequence
  Synthetic oligonucleotide
gcagagtgagaccatttccg

SEQ ID NO: 79 - DNA, 20 bp, Artificial sequence
  Synthetic oligonucleotide
tggcagagtgagaccatttc

SEQ ID NO: 80 - DNA, 20 bp, Artificial sequence
  Synthetic oligonucleotide
ttggcagagtgagaccattt

SEQ ID NO: 81 - DNA, 20 bp, Artificial sequence
  Synthetic oligonucleotide
cttggcagagtgagaccatt

SEQ ID NO: 82 - DNA, 20 bp, Artificial sequence
  Synthetic oligonucleotide
cagtgtgtagtgtaatataa

SEQ ID NO: 83 - DNA, 20 bp, Artificial sequence
  Synthetic oligonucleotide
acagtgtgtagtgtaatata

SEQ ID NO: 84 - DNA, 20 bp, Artificial sequence
  Synthetic oligonucleotide
acacagtgtgtagtgtaata

SEQ ID NO: 85 - DNA, 20 bp, Artificial sequence
  Synthetic oligonucleotide
tacacagtgtgtagtgtaat

SEQ ID NO: 86 - DNA, 20 bp, Artificial sequence
  Synthetic oligonucleotide
gtacacagtgtgtagtgtaa

SEQ ID NO: 87 - DNA, 20 bp, Artificial sequence
  Synthetic oligonucleotide
tgtaccttattcccttcctg

SEQ ID NO: 88 - DNA, 20 bp, Artificial sequence
  Synthetic oligonucleotide
ttgtaccttattcccttcct

SEQ ID NO: 89 - DNA, 20 bp, Artificial sequence
  Synthetic oligonucleotide
tcttgtaccttattcccttc

SEQ ID NO: 90 - DNA, 20 bp, Artificial sequence
  Synthetic oligonucleotide
ttcttgtaccttattccctt

SEQ ID NO: 91 - DNA, 20 bp, Artificial sequence
  Synthetic oligonucleotide
acatgtacccaaaccaacac

SEQ ID NO: 92 - DNA, 20 bp, Artificial sequence
  Synthetic oligonucleotide
cttcttgtaccttattccct

SEQ ID NO: 93 - DNA, 20 bp, Artificial sequence
  Synthetic oligonucleotide
tgcttcttgtaccttattcc

SEQ ID NO: 94 - DNA, 20 bp, Artificial sequence
  Synthetic oligonucleotide
atgcttcttgtaccttattc

SEQ ID NO: 95 - DNA, 20 bp, Artificial sequence
  Synthetic oligonucleotide
aaatgcttcttgtaccttat

SEQ ID NO: 96 - DNA, 20 bp, Artificial sequence
  Synthetic oligonucleotide
aaaatgcttcttgtacctta

SEQ ID NO: 97 - DNA, 20 bp, Artificial sequence
  Synthetic oligonucleotide
caaaatgcttcttgtacctt

SEQ ID NO: 98 - DNA, 20 bp, Artificial sequence
  Synthetic oligonucleotide
cttctgaatgcttgctttga

SEQ ID NO: 99 - DNA, 20 bp, Artificial sequence
  Synthetic oligonucleotide
tcttctgaatgcttgctttg

SEQ ID NO: 100 - DNA, 20 bp, Artificial sequence
  Synthetic oligonucleotide
tttcttctgaatgcttgctt

SEQ ID NO: 101 - DNA, 20 bp, Artificial sequence
  Synthetic oligonucleotide
ttttcttctgaatgcttgct

SEQ ID NO: 102 - DNA, 20 bp, Artificial sequence
  Synthetic oligonucleotide
tttttcttctgaatgcttgc

SEQ ID NO: 103 - DNA, 20 bp, Artificial sequence
  Synthetic oligonucleotide
tgcgataaatgggaaatact

SEQ ID NO: 104 - DNA, 20 bp, Artificial sequence
  Synthetic oligonucleotide
ctgcgataaatgggaaatac

SEQ ID NO: 105 - DNA, 20 bp, Artificial sequence
  Synthetic oligonucleotide
tctgcgataaatgggaaata

SEQ ID NO: 106 - DNA, 20 bp, Artificial sequence
  Synthetic oligonucleotide
ggtctgcgataaatgggaaa

SEQ ID NO: 107 - DNA, 20 bp, Artificial sequence
  Synthetic oligonucleotide
aggtctgcgataaatgggaa

SEQ ID NO: 108 - DNA, 20 bp, Artificial sequence
  Synthetic oligonucleotide
aaaggtctgcgataaatggg

SEQ ID NO: 109 - DNA, 20 bp, Artificial sequence
  Synthetic oligonucleotide
aaaaggtctgcgataaatgg

SEQ ID NO: 110 - DNA, 20 bp, Artificial sequence
  Synthetic oligonucleotide
aaaaaggtctgcgataaatg

SEQ ID NO: 111 - DNA, 20 bp, Artificial sequence
  Synthetic oligonucleotide
catgaaggccactcttccaa

SEQ ID NO: 112 - DNA, 20 bp, Artificial sequence
  Synthetic oligonucleotide
ccatgaaggccactcttcca

SEQ ID NO: 113 - DNA, 20 bp, Artificial sequence
  Synthetic oligonucleotide
cccatgaaggccactcttcc

SEQ ID NO: 114 - DNA, 20 bp, Artificial sequence
  Synthetic oligonucleotide
tgcccatgaaggccactctt

SEQ ID NO: 115 - DNA, 20 bp, Artificial sequence
  Synthetic oligonucleotide
ttgcccatgaaggccactct

SEQ ID NO: 116 - DNA, 20 bp, Artificial sequence
  Synthetic oligonucleotide
gttgcccatgaaggccactc

SEQ ID NO: 117 - DNA, 20 bp, Artificial sequence
  Synthetic oligonucleotide
ggtctttcatgaatcaagct

SEQ ID NO: 118 - DNA, 20 bp, Artificial sequence
  Synthetic oligonucleotide
tggtctttcatgaatcaagc

SEQ ID NO: 119 - DNA, 20 bp, Artificial sequence
  Synthetic oligonucleotide
atggtctttcatgaatcaag

SEQ ID NO: 120 - DNA, 20 bp, Artificial sequence
  Synthetic oligonucleotide
tgatggtctttcatgaatca

SEQ ID NO: 121 - DNA, 20 bp, Artificial sequence
  Synthetic oligonucleotide
ctgatggtctttcatgaatc

SEQ ID NO: 122 - DNA, 20 bp, Artificial sequence
  Synthetic oligonucleotide
gctgatggtctttcatgaat

SEQ ID NO: 123 - DNA, 20 bp, Artificial sequence
  Synthetic oligonucleotide
gtacccaaaccaacactaat

SEQ ID NO: 124 - DNA, 20 bp, Artificial sequence
  Synthetic oligonucleotide
tgtacccaaaccaacactaa

SEQ ID NO: 125 - DNA, 20 bp, Artificial sequence
  Synthetic oligonucleotide
atgtacccaaaccaacacta

SEQ ID NO: 126 - DNA, 20 bp, Artificial sequence
  Synthetic oligonucleotide
gacatgtacccaaaccaaca

SEQ ID NO: 127 - DNA, 20 bp, Artificial sequence
  Synthetic oligonucleotide
agacatgtacccaaaccaac

SEQ ID NO: 128 - DNA, 20 bp, Artificial sequence
  Synthetic oligonucleotide
aggaatggaaaaccaaatat

SEQ ID NO: 129 - DNA, 20 bp, Artificial sequence
  Synthetic oligonucleotide
caggaatggaaaaccaaata

SEQ ID NO: 130 - DNA, 20 bp, Artificial sequence
  Synthetic oligonucleotide
tcaggaatggaaaaccaaat

SEQ ID NO: 131 - DNA, 20 bp, Artificial sequence
  Synthetic oligonucleotide
actcaggaatggaaaaccaa

SEQ ID NO: 132 - DNA, 20 bp, Artificial sequence
  Synthetic oligonucleotide
aactcaggaatggaaaacca

SEQ ID NO: 133 - DNA, 20 bp, Artificial sequence
  Synthetic oligonucleotide
taactcaggaatggaaaacc

SEQ ID NO: 134 - DNA, 20 bp, Artificial sequence
  Synthetic oligonucleotide
caaaattactgcagtcacag

SEQ ID NO: 135 - DNA, 20 bp, Artificial sequence
  Synthetic oligonucleotide
acaaaattactgcagtcaca

SEQ ID NO: 136 - DNA, 20 bp, Artificial sequence
  Synthetic oligonucleotide
tacaaaattactgcagtcac

SEQ ID NO: 137 - DNA, 20 bp, Artificial sequence
  Synthetic oligonucleotide
catacaaaattactgcagtc

SEQ ID NO: 138 - DNA, 20 bp, Artificial sequence
  Synthetic oligonucleotide
acatacaaaattactgcagt

SEQ ID NO: 139 - DNA, 20 bp, Artificial sequence
  Synthetic oligonucleotide
aacatacaaaattactgcag

SEQ ID NO: 140 - DNA, 20 bp, Artificial sequence
  Synthetic oligonucleotide
ttttagtatgaaccttaaaa

SEQ ID NO: 141 - DNA, 20 bp, Artificial sequence
  Synthetic oligonucleotide
cttttagtatgaaccttaaa

SEQ ID NO: 142 - DNA, 20 bp, Artificial sequence
  Synthetic oligonucleotide
tcttttagtatgaaccttaa

SEQ ID NO: 143 - DNA, 20 bp, Artificial sequence
  Synthetic oligonucleotide
aatcttttagtatgaacctt

SEQ ID NO: 144 - DNA, 20 bp, Artificial sequence
  Synthetic oligonucleotide
caatcttttagtatgaacct

SEQ ID NO: 145 - DNA, 20 bp, Artificial sequence
  Synthetic oligonucleotide
acaatcttttagtatgaacc

SEQ ID NO: 146 - DNA, 20 bp, Artificial sequence
  Synthetic oligonucleotide
aagttatgtgactctgagca

SEQ ID NO: 147 - DNA, 20 bp, Artificial sequence
  Synthetic oligonucleotide
caagttatgtgactctgagc

SEQ ID NO: 148 - DNA, 20 bp, Artificial sequence
  Synthetic oligonucleotide
tcaagttatgtgactctgag

SEQ ID NO: 149 - DNA, 20 bp, Artificial sequence
  Synthetic oligonucleotide
agttctccattagggttctg

SEQ ID NO: 150 - DNA, 20 bp, Artificial sequence
  Synthetic oligonucleotide
tagttctccattagggttct

SEQ ID NO: 151 - DNA, 20 bp, Artificial sequence
  Synthetic oligonucleotide
atagttctccattagggttc

SEQ ID NO: 152 - DNA, 20 bp, Artificial sequence
  Synthetic oligonucleotide
aagcaggttggcagacagac

SEQ ID NO: 153 - DNA, 20 bp, Artificial sequence
  Synthetic oligonucleotide
gaagcaggttggcagacaga

SEQ ID NO: 154 - DNA, 20 bp, Artificial sequence
  Synthetic oligonucleotide
ggaagcaggttggcagacag

SEQ ID NO: 155 - DNA, 20 bp, Artificial sequence
  Synthetic oligonucleotide
tcttcttgtgagctggcttc

SEQ ID NO: 156 - DNA, 20 bp, Artificial sequence
  Synthetic oligonucleotide
gtcttcttgtgagctggctt

SEQ ID NO: 157 - DNA, 20 bp, Artificial sequence
  Synthetic oligonucleotide
agtcttcttgtgagctggct

SEQ ID NO: 158 - DNA, 20 bp, Artificial sequence
  Synthetic oligonucleotide
taagtcttcttgtgagctgg

SEQ ID NO: 159 - DNA, 20 bp, Artificial sequence
  Synthetic oligonucleotide
ttaagtcttcttgtgagctg

SEQ ID NO: 160 - DNA, 20 bp, Artificial sequence
  Synthetic oligonucleotide
attaagtcttcttgtgagct

SEQ ID NO: 161 - DNA, 20 bp, Artificial sequence
  Synthetic oligonucleotide
tctcttccactcacatccat

SEQ ID NO: 162 - DNA, 20 bp, Artificial sequence
  Synthetic oligonucleotide
gtctcttccactcacatcca

SEQ ID NO: 163 - DNA, 20 bp, Artificial sequence
  Synthetic oligonucleotide
agtctcttccactcacatcc

SEQ ID NO: 164 - DNA, 20 bp, Artificial sequence
  Synthetic oligonucleotide
taagtatttgtagcagttgc

SEQ ID NO: 165 - DNA, 20 bp, Artificial sequence
  Synthetic oligonucleotide
ctaagtatttgtagcagttg

SEQ ID NO: 166 - DNA, 20 bp, Artificial sequence
  Synthetic oligonucleotide
gctaagtatttgtagcagtt

SEQ ID NO: 167 - DNA, 20 bp, Artificial sequence
  Synthetic oligonucleotide
tggctaagtatttgtagcag

SEQ ID NO: 168 - DNA, 20 bp, Artificial sequence
  Synthetic oligonucleotide
ttggctaagtatttgtagca

SEQ ID NO: 169 - DNA, 20 bp, Artificial sequence
  Synthetic oligonucleotide
tttggctaagtatttgtagc

SEQ ID NO: 170 - DNA, 20 bp, Artificial sequence
  Synthetic oligonucleotide
aaaatgtcaacagtgcatag

SEQ ID NO: 171 - DNA, 20 bp, Artificial sequence
  Synthetic oligonucleotide
caaaatgtcaacagtgcata

SEQ ID NO: 172 - DNA, 20 bp, Artificial sequence
  Synthetic oligonucleotide
ccaaaatgtcaacagtgcat

SEQ ID NO: 173 - DNA, 20 bp, Artificial sequence
  Synthetic oligonucleotide
gcccaaaatgtcaacagtgc

SEQ ID NO: 174 - DNA, 20 bp, Artificial sequence
  Synthetic oligonucleotide
ggcccaaaatgtcaacagtg

SEQ ID NO: 175 - DNA, 20 bp, Artificial sequence
  Synthetic oligonucleotide
tggcccaaaatgtcaacagt

SEQ ID NO: 176 - DNA, 20 bp, Artificial sequence
  Synthetic oligonucleotide
cagaatcttctctttggcca

SEQ ID NO: 177 - DNA, 20 bp, Artificial sequence
  Synthetic oligonucleotide
gcagaatcttctctttggcc

SEQ ID NO: 178 - DNA, 20 bp, Artificial sequence
  Synthetic oligonucleotide
tgcagaatcttctctttggc

SEQ ID NO: 179 - DNA, 20 bp, Artificial sequence
  Synthetic oligonucleotide
tttgcagaatcttctctttg

SEQ ID NO: 180 - DNA, 20 bp, Artificial sequence
  Synthetic oligonucleotide
atttgcagaatcttctcttt

SEQ ID NO: 181 - DNA, 20 bp, Artificial sequence
  Synthetic oligonucleotide
aatttgcagaatcttctctt

SEQ ID NO: 182 - DNA, 20 bp, Artificial sequence
  Synthetic oligonucleotide
ataaagctatgccataaagc

SEQ ID NO: 183 - DNA, 20 bp, Artificial sequence
  Synthetic oligonucleotide
cataaagctatgccataaag

SEQ ID NO: 184 - DNA, 20 bp, Artificial sequence
  Synthetic oligonucleotide
ccataaagctatgccataaa

SEQ ID NO: 185 - DNA, 20 bp, Artificial sequence
  Synthetic oligonucleotide
gaccataaagctatgccata

SEQ ID NO: 186 - DNA, 20 bp, Artificial sequence
  Synthetic oligonucleotide
tgaccataaagctatgccat

SEQ ID NO: 187 - DNA, 20 bp, Artificial sequence
  Synthetic oligonucleotide
ctgaccataaagctatgcca

SEQ ID NO: 188 - DNA, 20 bp, Artificial sequence
  Synthetic oligonucleotide
caaaaagttgagctgagaaa

SEQ ID NO: 189 - DNA, 20 bp, Artificial sequence
  Synthetic oligonucleotide
ccaaaaagttgagctgagaa

SEQ ID NO: 190 - DNA, 20 bp, Artificial sequence
  Synthetic oligonucleotide
cccaaaaagttgagctgaga

SEQ ID NO: 191 - DNA, 20 bp, Artificial sequence
  Synthetic oligonucleotide
cacccaaaaagttgagctga

SEQ ID NO: 192 - DNA, 20 bp, Artificial sequence
  Synthetic oligonucleotide
acacccaaaaagttgagctg

SEQ ID NO: 193 - DNA, 20 bp, Artificial sequence
  Synthetic oligonucleotide
tacacccaaaaagttgagct

SEQ ID NO: 194 - DNA, 20 bp, Artificial sequence
  Synthetic oligonucleotide
cttttaatggcacccaagca

SEQ ID NO: 195 - DNA, 20 bp, Artificial sequence
  Synthetic oligonucleotide
gcttttaatggcacccaagc

SEQ ID NO: 196 - DNA, 20 bp, Artificial sequence
  Synthetic oligonucleotide
tgcttttaatggcacccaag

SEQ ID NO: 197 - DNA, 20 bp, Artificial sequence
  Synthetic oligonucleotide
aatgcttttaatggcaccca

SEQ ID NO: 198 - DNA, 20 bp, Artificial sequence
  Synthetic oligonucleotide
aaatgcttttaatggcaccc

SEQ ID NO: 199 - DNA, 20 bp, Artificial sequence
  Synthetic oligonucleotide
gaaatgcttttaatggcacc

SEQ ID NO: 200 - DNA, 20 bp, Artificial sequence
  Synthetic oligonucleotide
taattcttaagggccctctg

SEQ ID NO: 201 - DNA, 20 bp, Artificial sequence
  Synthetic oligonucleotide
ataattcttaagggccctct

SEQ ID NO: 202 - DNA, 20 bp, Artificial sequence
  Synthetic oligonucleotide
cataattcttaagggccctc

SEQ ID NO: 203 - DNA, 20 bp, Artificial sequence
  Synthetic oligonucleotide
agcataattcttaagggccc

SEQ ID NO: 204 - DNA, 20 bp, Artificial sequence
  Synthetic oligonucleotide
tagcataattcttaagggcc

SEQ ID NO: 205 - DNA, 20 bp, Artificial sequence
  Synthetic oligonucleotide
ttagcataattcttaagggc

SEQ ID NO: 206 - DNA, 20 bp, Artificial sequence
  Synthetic oligonucleotide
aggaatggaaaaccaaacat

SEQ ID NO: 207 - DNA, 20 bp, Artificial sequence
  Synthetic oligonucleotide
caggaatggaaaaccaaaca

SEQ ID NO: 208 - DNA, 20 bp, Artificial sequence
  Synthetic oligonucleotide
tcaggaatggaaaaccaaac

SEQ ID NO: 209 - DNA, 20 bp, Artificial sequence
  Synthetic oligonucleotide
aggaatggaaaaccaaatac

SEQ ID NO: 210 - DNA, 20 bp, Artificial sequence
  Synthetic oligonucleotide
catgactatgttctggcaag

SEQ ID NO: 211 - DNA, 20 bp, Artificial sequence
  Synthetic oligonucleotide
acatgactatgttctggcaa

SEQ ID NO: 212 - DNA, 20 bp, Artificial sequence
  Synthetic oligonucleotide
cacatgactatgttctggca

SEQ ID NO: 213 - DNA, 20 bp, Artificial sequence
  Synthetic oligonucleotide
gtcacatgactatgttctgg

SEQ ID NO: 214 - DNA, 20 bp, Artificial sequence
  Synthetic oligonucleotide
ggtcacatgactatgttctg

SEQ ID NO: 215 - DNA, 20 bp, Artificial sequence
  Synthetic oligonucleotide
tggtcacatgactatgttct

SEQ ID NO: 216 - DNA, 20 bp, Artificial sequence
  Synthetic oligonucleotide
ctgaattctgagctctggaa

SEQ ID NO: 217 - DNA, 20 bp, Artificial sequence
  Synthetic oligonucleotide
cctgaattctgagctctgga

SEQ ID NO: 218 - DNA, 20 bp, Artificial sequence
  Synthetic oligonucleotide
gcctgaattctgagctctgg

SEQ ID NO: 219 - DNA, 20 bp, Artificial sequence
  Synthetic oligonucleotide
aagcctgaattctgagctct

SEQ ID NO: 220 - DNA, 20 bp, Artificial sequence
  Synthetic oligonucleotide
caagcctgaattctgagctc

SEQ ID NO: 221 - DNA, 20 bp, Artificial sequence
  Synthetic oligonucleotide
acaagcctgaattctgagct

SEQ ID NO: 222 - DNA, 20 bp, Artificial sequence
  Synthetic oligonucleotide
ggatctcagctgcaattctt

SEQ ID NO: 223 - DNA, 20 bp, Artificial sequence
  Synthetic oligonucleotide
aggatctcagctgcaattct

SEQ ID NO: 224 - DNA, 20 bp, Artificial sequence
  Synthetic oligonucleotide
gaggatctcagctgcaattc

SEQ ID NO: 225 - DNA, 20 bp, Artificial sequence
  Synthetic oligonucleotide
cagaggatctcagctgcaat

SEQ ID NO: 226 - DNA, 20 bp, Artificial sequence
  Synthetic oligonucleotide
gcagaggatctcagctgcaa

SEQ ID NO: 227 - DNA, 20 bp, Artificial sequence
  Synthetic oligonucleotide
aaaagcatcacttgatcctg

SEQ ID NO: 228 - DNA, 17 bp, Artificial sequence
  Synthetic oligonucleotide
caaggtcaacagcagct

SEQ ID NO: 229 - DNA, 17 bp, Artificial sequence
  Synthetic oligonucleotide
ccaaggtcaacagcagc

SEQ ID NO: 230 - DNA, 17 bp, Artificial sequence
  Synthetic oligonucleotide
gccaaggtcaacagcag

SEQ ID NO: 231 - DNA, 17 bp, Artificial sequence
  Synthetic oligonucleotide
tctcacacgcacttcat

SEQ ID NO: 232 - DNA, 17 bp, Artificial sequence
  Synthetic oligonucleotide
atctcacacgcacttca

SEQ ID NO: 233 - DNA, 17 bp, Artificial sequence
  Synthetic oligonucleotide
gatctcacacgcacttc

SEQ ID NO: 234 - DNA, 17 bp, Artificial sequence
  Synthetic oligonucleotide
ctttcatgaatcaagct

SEQ ID NO: 235 - DNA, 17 bp, Artificial sequence
  Synthetic oligonucleotide
tctttcatgaatcaagc

SEQ ID NO: 236 - DNA, 17 bp, Artificial sequence
  Synthetic oligonucleotide
gtctttcatgaatcaag

SEQ ID NO: 237 - DNA, 17 bp, Artificial sequence
  Synthetic oligonucleotide
ggtctttcatgaatcaa

SEQ ID NO: 238 - DNA, 17 bp, Artificial sequence
  Synthetic oligonucleotide
atggtctttcatgaatc

SEQ ID NO: 239 - DNA, 17 bp, Artificial sequence
  Synthetic oligonucleotide
gatggtctttcatgaat

SEQ ID NO: 240 - DNA, 17 bp, Artificial sequence
  Synthetic oligonucleotide
tatatcaatattctccc

SEQ ID NO: 241 - DNA, 17 bp, Artificial sequence
  Synthetic oligonucleotide
ttatatcaatattctcc

SEQ ID NO: 242 - DNA, 17 bp, Artificial sequence
  Synthetic oligonucleotide
gttatatcaatattctc

SEQ ID NO: 243 - DNA, 17 bp, Artificial sequence
  Synthetic oligonucleotide
tttctttagcaatagtt

SEQ ID NO: 244 - DNA, 17 bp, Artificial sequence
  Synthetic oligonucleotide
ctttctttagcaatagt

SEQ ID NO: 245 - DNA, 17 bp, Artificial sequence
  Synthetic oligonucleotide
gctttctttagcaatag

SEQ ID NO: 246 - DNA, 17 bp, Artificial sequence
  Synthetic oligonucleotide
aggaatggaaaaccaaa

SEQ ID NO: 247 - DNA, 17 bp, Artificial sequence
  Synthetic oligonucleotide
caggaatggaaaaccaa

SEQ ID NO: 248 - DNA, 17 bp, Artificial sequence
  Synthetic oligonucleotide
tcaggaatggaaaacca

SEQ ID NO: 249 - DNA, 17 bp, Artificial sequence
  Synthetic oligonucleotide
tctccattagggttctg

SEQ ID NO: 250 - DNA, 17 bp, Artificial sequence
  Synthetic oligonucleotide
ttctccattagggttct

SEQ ID NO: 251 - DNA, 17 bp, Artificial sequence
  Synthetic oligonucleotide
gttctccattagggttc

SEQ ID NO: 252 - DNA, 17 bp, Artificial sequence
  Synthetic oligonucleotide
aggttggcagacagaca

SEQ ID NO: 253 - DNA, 17 bp, Artificial sequence
  Synthetic oligonucleotide
caggttggcagacagac

SEQ ID NO: 254 - DNA, 17 bp, Artificial sequence
  Synthetic oligonucleotide
gcaggttggcagacaga

SEQ ID NO: 255 - DNA, 17 bp, Artificial sequence
  Synthetic oligonucleotide
cttcttgtgagctggct

SEQ ID NO: 256 - DNA, 17 bp, Artificial sequence
  Synthetic oligonucleotide
tcttcttgtgagctggc

SEQ ID NO: 257 - DNA, 17 bp, Artificial sequence
  Synthetic oligonucleotide
gtcttcttgtgagctgg

SEQ ID NO: 258 - DNA, 17 bp, Artificial sequence
  Synthetic oligonucleotide
agtcttcttgtgagctg

SEQ ID NO: 259 - DNA, 17 bp, Artificial sequence
  Synthetic oligonucleotide
tcttccactcacatcca

SEQ ID NO: 260 - DNA, 17 bp, Artificial sequence
  Synthetic oligonucleotide
ctcttccactcacatcc

SEQ ID NO: 261 - DNA, 17 bp, Artificial sequence
  Synthetic oligonucleotide
tctcttccactcacatc

SEQ ID NO: 262 - DNA, 17 bp, Artificial sequence
  Synthetic oligonucleotide
gtctcttccactcacat

SEQ ID NO: 263 - DNA, 17 bp, Artificial sequence
  Synthetic oligonucleotide
atagattttgacttccc

SEQ ID NO: 264 - DNA, 17 bp, Artificial sequence
  Synthetic oligonucleotide
catagattttgacttcc

SEQ ID NO: 265 - DNA, 17 bp, Artificial sequence
  Synthetic oligonucleotide
gcatagattttgacttc

SEQ ID NO: 266 - DNA, 17 bp, Artificial sequence
  Synthetic oligonucleotide
aaaatgtcaacagtgca

SEQ ID NO: 267 - DNA, 17 bp, Artificial sequence
  Synthetic oligonucleotide
caaaatgtcaacagtgc

SEQ ID NO: 268 - DNA, 17 bp, Artificial sequence
  Synthetic oligonucleotide
ccaaaatgtcaacagtg

SEQ ID NO: 269 - DNA, 17 bp, Artificial sequence
  Synthetic oligonucleotide
cccaaaatgtcaacagt

SEQ ID NO: 270 - DNA, 17 bp, Artificial sequence
  Synthetic oligonucleotide
catgactatgttctggc

SEQ ID NO: 271 - DNA, 17 bp, Artificial sequence
  Synthetic oligonucleotide
acatgactatgttctgg

SEQ ID NO: 272 - DNA, 17 bp, Artificial sequence
  Synthetic oligonucleotide
cacatgactatgttctg

SEQ ID NO: 273 - DNA, 17 bp, Artificial sequence
  Synthetic oligonucleotide
gaattctgagctctgga

SEQ ID NO: 274 - DNA, 17 bp, Artificial sequence
  Synthetic oligonucleotide
tgaattctgagctctgg

SEQ ID NO: 275 - DNA, 17 bp, Artificial sequence
  Synthetic oligonucleotide
ctgaattctgagctctg

SEQ ID NO: 276 - DNA, 17 bp, Artificial sequence
  Synthetic oligonucleotide
cctgaattctgagctct

SEQ ID NO: 277 - DNA, 17 bp, Artificial sequence
  Synthetic oligonucleotide
gcctgaattctgagctc

SEQ ID NO: 278 - DNA, 17 bp, Artificial sequence
  Synthetic oligonucleotide
agcctgaattctgagct

SEQ ID NO: 279 - DNA, 17 bp, Artificial sequence
  Synthetic oligonucleotide
atattgtaattcttggt

SEQ ID NO: 280 - DNA, 17 bp, Artificial sequence
  Synthetic oligonucleotide
gatattgtaattcttgg

SEQ ID NO: 281 - DNA, 17 bp, Artificial sequence
  Synthetic oligonucleotide
tgatattgtaattcttg

SEQ ID NO: 282 - DNA, 17 bp, Artificial sequence
  Synthetic oligonucleotide
ctgatattgtaattctt

SEQ ID NO: 283 - DNA, 17 bp, Artificial sequence
  Synthetic oligonucleotide
cctgatattgtaattct

SEQ ID NO: 284 - DNA, 17 bp, Artificial sequence
  Synthetic oligonucleotide
gcctgatattgtaattc

SEQ ID NO: 285 - DNA, 17 bp, Artificial sequence
  Synthetic oligonucleotide
tgcctgatattgtaatt

SEQ ID NO: 286 - DNA, 17 bp, Artificial sequence
  Synthetic oligonucleotide
aattatgtgctttgcct

SEQ ID NO: 287 - DNA, 17 bp, Artificial sequence
  Synthetic oligonucleotide
caattatgtgctttgcc

SEQ ID NO: 288 - DNA, 17 bp, Artificial sequence
  Synthetic oligonucleotide
tcaattatgtgctttgc

SEQ ID NO: 289 - DNA, 17 bp, Artificial sequence
  Synthetic oligonucleotide
gtcaattatgtgctttg

SEQ ID NO: 290 - DNA, 17 bp, Artificial sequence
  Synthetic oligonucleotide
gccatcaccaaacacca

SEQ ID NO: 291 - DNA, 17 bp, Artificial sequence
  Synthetic oligonucleotide
tgccatcaccaaacacc

SEQ ID NO: 292 - DNA, 17 bp, Artificial sequence
  Synthetic oligonucleotide
ttgccatcaccaaacac

SEQ ID NO: 293 - DNA, 17 bp, Artificial sequence
  Synthetic oligonucleotide
tggtgactctgcctgat

SEQ ID NO: 294 - DNA, 17 bp, Artificial sequence
  Synthetic oligonucleotide
ctggtgactctgcctga

SEQ ID NO: 295 - DNA, 20 bp, Artificial sequence
  Synthetic oligonucleotide
tatttcagaaagactttctg

SEQ ID NO: 296 - DNA, 20 bp, Artificial sequence
  Synthetic oligonucleotide
aggaaaaaatcaaggagtta

SEQ ID NO: 297 - DNA, 20 bp, Artificial sequence
  Synthetic oligonucleotide
tatttactgaacacctattc

SEQ ID NO: 298 - DNA, 20 bp, Artificial sequence
  Synthetic oligonucleotide
gcccatgaaggccactcttc

SEQ ID NO: 299 - DNA, 20 bp, Artificial sequence
  Synthetic oligonucleotide
acctataaataaagtgagga

SEQ ID NO: 300 - DNA, 20 bp, Artificial sequence
  Synthetic oligonucleotide
gtttcataacctgctaataa

SEQ ID NO: 301 - DNA, 20 bp, Artificial sequence
  Synthetic oligonucleotide
atgtgccttacagttatcag

SEQ ID NO: 302 - DNA, 20 bp, Artificial sequence
  Synthetic oligonucleotide
ttctgaatttagaattatag

SEQ ID NO: 303 - DNA, 20 bp, Artificial sequence
  Synthetic oligonucleotide
gtttataatctagcagttac

SEQ ID NO: 304 - DNA, 20 bp, Artificial sequence
  Synthetic oligonucleotide
gatggtctttcatgaatcaa

SEQ ID NO: 305 - DNA, 20 bp, Artificial sequence
  Synthetic oligonucleotide
catgtacccaaaccaacact

SEQ ID NO: 306 - DNA, 20 bp, Artificial sequence
  Synthetic oligonucleotide
taaaatacagcctacatcat

SEQ ID NO: 307 - DNA, 20 bp, Artificial sequence
  Synthetic oligonucleotide
ccatcactacaacaaactca

SEQ ID NO: 308 - DNA, 20 bp, Artificial sequence
  Synthetic oligonucleotide
atctgaaatgatcccctttc

SEQ ID NO: 309 - DNA, 20 bp, Artificial sequence
  Synthetic oligonucleotide
tgttgcccctccaaaaagac

SEQ ID NO: 310 - DNA, 20 bp, Artificial sequence
  Synthetic oligonucleotide
attaaaattttaaatgatgt

SEQ ID NO: 311 - DNA, 20 bp, Artificial sequence
  Synthetic oligonucleotide
ctcaggaatggaaaaccaaa

SEQ ID NO: 312 - DNA, 20 bp, Artificial sequence
  Synthetic oligonucleotide
aaaattctagaagataacat

SEQ ID NO: 313 - DNA, 20 bp, Artificial sequence
  Synthetic oligonucleotide
ctagaagtcctagccagagt

SEQ ID NO: 314 - DNA, 20 bp, Artificial sequence
  Synthetic oligonucleotide
aaccgatatcacagaaatac

SEQ ID NO: 315 - DNA, 20 bp, Artificial sequence
  Synthetic oligonucleotide
aagatagacagtaacataat

SEQ ID NO: 316 - DNA, 20 bp, Artificial sequence
  Synthetic oligonucleotide
gcactacaagaactgcttaa

SEQ ID NO: 317 - DNA, 20 bp, Artificial sequence
  Synthetic oligonucleotide
tttccagacaaagaattcag

SEQ ID NO: 318 - DNA, 20 bp, Artificial sequence
  Synthetic oligonucleotide
gtagacagcctttctggaac

SEQ ID NO: 319 - DNA, 20 bp, Artificial sequence
  Synthetic oligonucleotide
catcctacatagtggctgtg

SEQ ID NO: 320 - DNA, 20 bp, Artificial sequence
  Synthetic oligonucleotide
cagaacagtgtgtggagact

SEQ ID NO: 321 - DNA, 20 bp, Artificial sequence
  Synthetic oligonucleotide
agctttaaaaatacctctgc

SEQ ID NO: 322 - DNA, 20 bp, Artificial sequence
  Synthetic oligonucleotide
cccaggtacttgctctcaga

SEQ ID NO: 323 - DNA, 20 bp, Artificial sequence
  Synthetic oligonucleotide
ttacacctgattctagaaat

SEQ ID NO: 324 - DNA, 20 bp, Artificial sequence
  Synthetic oligonucleotide
cttttctctacaacctcaca

SEQ ID NO: 325 - DNA, 20 bp, Artificial sequence
  Synthetic oligonucleotide
tagtagtttgaatttcaaag

SEQ ID NO: 326 - DNA, 20 bp, Artificial sequence
  Synthetic oligonucleotide
atacaaaattactgcagtca

SEQ ID NO: 327 - DNA, 20 bp, Artificial sequence
  Synthetic oligonucleotide
gccactgccaaaaaggagga

SEQ ID NO: 328 - DNA, 20 bp, Artificial sequence
  Synthetic oligonucleotide
tgacagaaacagagctatga

SEQ ID NO: 329 - DNA, 20 bp, Artificial sequence
  Synthetic oligonucleotide
atcttttagtatgaacctta

SEQ ID NO: 330 - DNA, 20 bp, Artificial sequence
  Synthetic oligonucleotide
agttatgtgactctgagcac

SEQ ID NO: 331 - DNA, 20 bp, Artificial sequence
  Synthetic oligonucleotide
actatgccctagttacttct

SEQ ID NO: 332 - DNA, 20 bp, Artificial sequence
  Synthetic oligonucleotide
tatagtggaagtgatagatc

SEQ ID NO: 333 - DNA, 20 bp, Artificial sequence
  Synthetic oligonucleotide
tgttttctgaaatggaatgt

SEQ ID NO: 334 - DNA, 20 bp, Artificial sequence
  Synthetic oligonucleotide
gctgtaaatgtaatgagtgt

SEQ ID NO: 335 - DNA, 20 bp, Artificial sequence
  Synthetic oligonucleotide
gagagaagccatggccctag

SEQ ID NO: 336 - DNA, 20 bp, Artificial sequence
  Synthetic oligonucleotide
ctctctttcccagaacaaga

SEQ ID NO: 337 - DNA, 20 bp, Artificial sequence
  Synthetic oligonucleotide
tccaaaatgtccagtataat

SEQ ID NO: 338 - DNA, 20 bp, Artificial sequence
  Synthetic oligonucleotide
gttctccattagggttctgg

SEQ ID NO: 339 - DNA, 20 bp, Artificial sequence
  Synthetic oligonucleotide
ttagtcacccatccaccact

SEQ ID NO: 340 - DNA, 20 bp, Artificial sequence
  Synthetic oligonucleotide
catgaattcaccgagttagg

SEQ ID NO: 341 - DNA, 20 bp, Artificial sequence
  Synthetic oligonucleotide
agcaggttggcagacagaca

SEQ ID NO: 342 - DNA, 20 bp, Artificial sequence
  Synthetic oligonucleotide
gaaagacttaaattttcaca

SEQ ID NO: 343 - DNA, 20 bp, Artificial sequence
  Synthetic oligonucleotide
tagtagaggaaaaggagaat

SEQ ID NO: 344 - DNA, 20 bp, Artificial sequence
  Synthetic oligonucleotide
aaacagggtctggagtggac

SEQ ID NO: 345 - DNA, 20 bp, Artificial sequence
  Synthetic oligonucleotide
caagctgataattaaaaaga

SEQ ID NO: 346 - DNA, 20 bp, Artificial sequence
  Synthetic oligonucleotide
ataaagatacattttctggg

SEQ ID NO: 347 - DNA, 20 bp, Artificial sequence
  Synthetic oligonucleotide
caggattcttcctgcctggc

SEQ ID NO: 348 - DNA, 20 bp, Artificial sequence
  Synthetic oligonucleotide
aagtcttcttgtgagctggc

SEQ ID NO: 349 - DNA, 20 bp, Artificial sequence
  Synthetic oligonucleotide
ctcttccactcacatccatt

SEQ ID NO: 350 - DNA, 20 bp, Artificial sequence
  Synthetic oligonucleotide
cctatatcagaagacaaatg

SEQ ID NO: 351 - DNA, 20 bp, Artificial sequence
  Synthetic oligonucleotide
tcaaaaccctgccaaggtac

SEQ ID NO: 352 - DNA, 20 bp, Artificial sequence
  Synthetic oligonucleotide
tcatattctacttctgttta

SEQ ID NO: 353 - DNA, 20 bp, Artificial sequence
  Synthetic oligonucleotide
cattccagtgtttcagtaag

SEQ ID NO: 354 - DNA, 20 bp, Artificial sequence
  Synthetic oligonucleotide
ggcctggaattaatcctcag

SEQ ID NO: 355 - DNA, 20 bp, Artificial sequence
  Synthetic oligonucleotide
aatgccctctccctgtgcct

SEQ ID NO: 356 - DNA, 20 bp, Artificial sequence
  Synthetic oligonucleotide
tttataatcaacctttgcta

SEQ ID NO: 357 - DNA, 20 bp, Artificial sequence
  Synthetic oligonucleotide
atataactacttaaaataat

SEQ ID NO: 358 - DNA, 20 bp, Artificial sequence
  Synthetic oligonucleotide
ttagccaggatatggttgcc

SEQ ID NO: 359 - DNA, 20 bp, Artificial sequence
  Synthetic oligonucleotide
ctacctccatcaaagaaaat

SEQ ID NO: 360 - DNA, 20 bp, Artificial sequence
  Synthetic oligonucleotide
gcatgcatagataagtttga

SEQ ID NO: 361 - DNA, 20 bp, Artificial sequence
  Synthetic oligonucleotide
atgagagtaaatggattttc

SEQ ID NO: 362 - DNA, 20 bp, Artificial sequence
  Synthetic oligonucleotide
ttggcaatccttgcttaaaa

SEQ ID NO: 363 - DNA, 20 bp, Artificial sequence
  Synthetic oligonucleotide
gaattaagccagacttattt

SEQ ID NO: 364 - DNA, 20 bp, Artificial sequence
  Synthetic oligonucleotide
ggctaagtatttgtagcagt

SEQ ID NO: 365 - DNA, 20 bp, Artificial sequence
  Synthetic oligonucleotide
ttgcctgtgtgcaactggcg

SEQ ID NO: 366 - DNA, 20 bp, Artificial sequence
  Synthetic oligonucleotide
gtggccttagtaggccagct

SEQ ID NO: 367 - DNA, 20 bp, Artificial sequence
  Synthetic oligonucleotide
cccaaaatgtcaacagtgca

SEQ ID NO: 368 - DNA, 20 bp, Artificial sequence
  Synthetic oligonucleotide
ttaagccttcaatttgaaaa

SEQ ID NO: 369 - DNA, 20 bp, Artificial sequence
  Synthetic oligonucleotide
tgctcagaaggttgagcata

SEQ ID NO: 370 - DNA, 20 bp, Artificial sequence
  Synthetic oligonucleotide
ttaatgctttcccaaagctc

SEQ ID NO: 371 - DNA, 20 bp, Artificial sequence
  Synthetic oligonucleotide
aaaagacttcatacctttac

SEQ ID NO: 372 - DNA, 20 bp, Artificial sequence
  Synthetic oligonucleotide
ggccccctggcacaacagga

SEQ ID NO: 373 - DNA, 20 bp, Artificial sequence
  Synthetic oligonucleotide
tctagggtgattcaggtgga

SEQ ID NO: 374 - DNA, 20 bp, Artificial sequence
  Synthetic oligonucleotide
cttagattaatgcaaaacaa

SEQ ID NO: 375 - DNA, 20 bp, Artificial sequence
  Synthetic oligonucleotide
aggcagaggagggtggaacc

SEQ ID NO: 376 - DNA, 20 bp, Artificial sequence
  Synthetic oligonucleotide
agtctaatgagatctgatgg

SEQ ID NO: 377 - DNA, 20 bp, Artificial sequence
  Synthetic oligonucleotide
gctgaaatgagttaagactt

SEQ ID NO: 378 - DNA, 20 bp, Artificial sequence
  Synthetic oligonucleotide
actttggactgtggattttt

SEQ ID NO: 379 - DNA, 20 bp, Artificial sequence
  Synthetic oligonucleotide
gcatatttacacaatgcctg

SEQ ID NO: 380 - DNA, 20 bp, Artificial sequence
  Synthetic oligonucleotide
ggaaatgcctggatgtccag

SEQ ID NO: 381 - DNA, 20 bp, Artificial sequence
  Synthetic oligonucleotide
ctgctgattttggaatggag

SEQ ID NO: 382 - DNA, 20 bp, Artificial sequence
  Synthetic oligonucleotide
actgaacacctattctatgg

SEQ ID NO: 383 - DNA, 20 bp, Artificial sequence
  Synthetic oligonucleotide
tttactgaacacctattcta

SEQ ID NO: 384 - DNA, 20 bp, Artificial sequence
  Synthetic oligonucleotide
ccctcaaattatccacaaac

SEQ ID NO: 385 - DNA, 20 bp, Artificial sequence
  Synthetic oligonucleotide
cttctaaatgtttccaaggc

SEQ ID NO: 386 - DNA, 20 bp, Artificial sequence
  Synthetic oligonucleotide
ttacatcctgtaggctaatt

SEQ ID NO: 387 - DNA, 20 bp, Artificial sequence
  Synthetic oligonucleotide
ccactagcctggccagactt

SEQ ID NO: 388 - DNA, 20 bp, Artificial sequence
  Synthetic oligonucleotide
ctggtagatgatctcaagtt

SEQ ID NO: 389 - DNA, 20 bp, Artificial sequence
  Synthetic oligonucleotide
aaagaattgagttataaatc

SEQ ID NO: 390 - DNA, 20 bp, Artificial sequence
  Synthetic oligonucleotide
aactcatctctggccagcag

SEQ ID NO: 391 - DNA, 20 bp, Artificial sequence
  Synthetic oligonucleotide
caacatcattgtattttctg

SEQ ID NO: 392 - DNA, 20 bp, Artificial sequence
  Synthetic oligonucleotide
tcttagcttaccaatgagga

SEQ ID NO: 393 - DNA, 20 bp, Artificial sequence
  Synthetic oligonucleotide
ttcccagagccaaagctcaa

SEQ ID NO: 394 - DNA, 20 bp, Artificial sequence
  Synthetic oligonucleotide
tttggccaatcccagcttat

SEQ ID NO: 395 - DNA, 20 bp, Artificial sequence
  Synthetic oligonucleotide
gtttgcaaatcttcattcac

SEQ ID NO: 396 - DNA, 20 bp, Artificial sequence
  Synthetic oligonucleotide
caatagtccctgaggcttgg

SEQ ID NO: 397 - DNA, 20 bp, Artificial sequence
  Synthetic oligonucleotide
tttccccagattaaatgccc

SEQ ID NO: 398 - DNA, 20 bp, Artificial sequence
  Synthetic oligonucleotide
ttcaataatgcagttattat

SEQ ID NO: 399 - DNA, 20 bp, Artificial sequence
  Synthetic oligonucleotide
aaattcttgggcttaagcac

SEQ ID NO: 400 - DNA, 20 bp, Artificial sequence
  Synthetic oligonucleotide
tgatccaaattcagtaccta

SEQ ID NO: 401 - DNA, 20 bp, Artificial sequence
  Synthetic oligonucleotide
gatgatccaaattcagtacc

SEQ ID NO: 402 - DNA, 20 bp, Artificial sequence
  Synthetic oligonucleotide
caatattcatctttatattc

SEQ ID NO: 403 - DNA, 20 bp, Artificial sequence
  Synthetic oligonucleotide
attgctcttaagataagtaa

SEQ ID NO: 404 - DNA, 20 bp, Artificial sequence
  Synthetic oligonucleotide
cagctccctgaatatctctt

SEQ ID NO: 405 - DNA, 20 bp, Artificial sequence
  Synthetic oligonucleotide
acttcacaaatatattataa

SEQ ID NO: 406 - DNA, 20 bp, Artificial sequence
  Synthetic oligonucleotide
gtacagtcaactttacttca

SEQ ID NO: 407 - DNA, 20 bp, Artificial sequence
  Synthetic oligonucleotide
caattcccactcttgtcaac

SEQ ID NO: 408 - DNA, 20 bp, Artificial sequence
  Synthetic oligonucleotide
tcaactgctttctggagcag

SEQ ID NO: 409 - DNA, 20 bp, Artificial sequence
  Synthetic oligonucleotide
actgctgagcacctccaaaa

SEQ ID NO: 410 - DNA, 20 bp, Artificial sequence
  Synthetic oligonucleotide
cttagattcctggtttatca

SEQ ID NO: 411 - DNA, 20 bp, Artificial sequence
  Synthetic oligonucleotide
agttatatcaatattctccc

SEQ ID NO: 412 - DNA, 20 bp, Artificial sequence
  Synthetic oligonucleotide
tataccatcttccccataaa

SEQ ID NO: 413 - DNA, 20 bp, Artificial sequence
  Synthetic oligonucleotide
ggctttctttagcaatagtt

SEQ ID NO: 414 - DNA, 20 bp, Artificial sequence
  Synthetic oligonucleotide
taccagggatgtaggtttac

SEQ ID NO: 415 - DNA, 20 bp, Artificial sequence
  Synthetic oligonucleotide
tcacagctgaattctatctg

SEQ ID NO: 416 - DNA, 20 bp, Artificial sequence
  Synthetic oligonucleotide
ggagatggacaaattcctgc

SEQ ID NO: 417 - DNA, 20 bp, Artificial sequence
  Synthetic oligonucleotide
ctagacatgtcatcaagaca

SEQ ID NO: 418 - DNA, 20 bp, Artificial sequence
  Synthetic oligonucleotide
caaattaataaaacaattac

SEQ ID NO: 419 - DNA, 20 bp, Artificial sequence
  Synthetic oligonucleotide
tattcttatatcagacaaaa

SEQ ID NO: 420 - DNA, 20 bp, Artificial sequence
  Synthetic oligonucleotide
tcaagggatccctgccattc

SEQ ID NO: 421 - DNA, 20 bp, Artificial sequence
  Synthetic oligonucleotide
cgtcaagggatccctgccat

SEQ ID NO: 422 - DNA, 20 bp, Artificial sequence
  Synthetic oligonucleotide
ggcactcccagtctccagct

SEQ ID NO: 423 - DNA, 20 bp, Artificial sequence
  Synthetic oligonucleotide
tttctccagcagaagtgtca

SEQ ID NO: 424 - DNA, 20 bp, Artificial sequence
  Synthetic oligonucleotide
aagtcctcttccgcctccct

SEQ ID NO: 425 - DNA, 20 bp, Artificial sequence
  Synthetic oligonucleotide
ggaatttaccaaaaacagtt

SEQ ID NO: 426 - DNA, 20 bp, Artificial sequence
  Synthetic oligonucleotide
agttaggtattgtccatttt

SEQ ID NO: 427 - DNA, 20 bp, Artificial sequence
  Synthetic oligonucleotide
acatgggtatcttctaggaa

SEQ ID NO: 428 - DNA, 20 bp, Artificial sequence
  Synthetic oligonucleotide
tcagtttcagagagacaaaa

SEQ ID NO: 429 - DNA, 20 bp, Artificial sequence
  Synthetic oligonucleotide
tttgccaggtcctatgtcga

SEQ ID NO: 430 - DNA, 20 bp, Artificial sequence
  Synthetic oligonucleotide
attcccttttctctacaacc

SEQ ID NO: 431 - DNA, 20 bp, Artificial sequence
  Synthetic oligonucleotide
atgataagagccaagatttg

SEQ ID NO: 432 - DNA, 20 bp, Artificial sequence
  Synthetic oligonucleotide
gaaaaaaggtccactgtggt

SEQ ID NO: 433 - DNA, 20 bp, Artificial sequence
  Synthetic oligonucleotide
cctgtcctggaatagtttca

SEQ ID NO: 434 - DNA, 20 bp, Artificial sequence
  Synthetic oligonucleotide
tagaaaagtaaataaggaat

SEQ ID NO: 435 - DNA, 20 bp, Artificial sequence
  Synthetic oligonucleotide
ttataaaactatgcaatagg

SEQ ID NO: 436 - DNA, 20 bp, Artificial sequence
  Synthetic oligonucleotide
ttatttcatatttccagaaa

SEQ ID NO: 437 - DNA, 20 bp, Artificial sequence
  Synthetic oligonucleotide
catgaattacagctaaagat

SEQ ID NO: 438 - DNA, 20 bp, Artificial sequence
  Synthetic oligonucleotide
ttgcatgtatgtgtttctga

SEQ ID NO: 439 - DNA, 20 bp, Artificial sequence
  Synthetic oligonucleotide
tcaatctctttataccctta

SEQ ID NO: 440 - DNA, 20 bp, Artificial sequence
  Synthetic oligonucleotide
tcttcaatctctttataccc

SEQ ID NO: 441 - DNA, 20 bp, Artificial sequence
  Synthetic oligonucleotide
ctatgccctagttacttcta

SEQ ID NO: 442 - DNA, 20 bp, Artificial sequence
  Synthetic oligonucleotide
aaagagaatctcttcctttt

SEQ ID NO: 443 - DNA, 20 bp, Artificial sequence
  Synthetic oligonucleotide
tcattaaagattattataac

SEQ ID NO: 444 - DNA, 20 bp, Artificial sequence
  Synthetic oligonucleotide
tttggatgagtggaaggcta

SEQ ID NO: 445 - DNA, 20 bp, Artificial sequence
  Synthetic oligonucleotide
ggaaatggcctttttcctta

SEQ ID NO: 446 - DNA, 20 bp, Artificial sequence
  Synthetic oligonucleotide
ggagaagccctctgcctgta

SEQ ID NO: 447 - DNA, 20 bp, Artificial sequence
  Synthetic oligonucleotide
aaaccatattgtccaccaga

SEQ ID NO: 448 - DNA, 20 bp, Artificial sequence
  Synthetic oligonucleotide
ctcaaaccatattgtccacc

SEQ ID NO: 449 - DNA, 20 bp, Artificial sequence
  Synthetic oligonucleotide
gtgtaaatagtgacttgtac

SEQ ID NO: 450 - DNA, 20 bp, Artificial sequence
  Synthetic oligonucleotide
tgaggcacaggaaagttaac

SEQ ID NO: 451 - DNA, 20 bp, Artificial sequence
  Synthetic oligonucleotide
agctatagttctccattagg

SEQ ID NO: 452 - DNA, 20 bp, Artificial sequence
  Synthetic oligonucleotide
ttacttgctgactaagccat

SEQ ID NO: 453 - DNA, 20 bp, Artificial sequence
  Synthetic oligonucleotide
gtttgtcaactcaacatcaa

SEQ ID NO: 454 - DNA, 20 bp, Artificial sequence
  Synthetic oligonucleotide
gactatttgtatatatatac

SEQ ID NO: 455 - DNA, 20 bp, Artificial sequence
  Synthetic oligonucleotide
atgactatttgtatatatat

SEQ ID NO: 456 - DNA, 20 bp, Artificial sequence
  Synthetic oligonucleotide
actcttccttatatttgctc

SEQ ID NO: 457 - DNA, 20 bp, Artificial sequence
  Synthetic oligonucleotide
atacactgacttttaacatt

SEQ ID NO: 458 - DNA, 20 bp, Artificial sequence
  Synthetic oligonucleotide
cttagaaacagtagtttcat

SEQ ID NO: 459 - DNA, 20 bp, Artificial sequence
  Synthetic oligonucleotide
ctgagctttgccttaagaat

SEQ ID NO: 460 - DNA, 20 bp, Artificial sequence
  Synthetic oligonucleotide
caccagacagcaggtagagc

SEQ ID NO: 461 - DNA, 20 bp, Artificial sequence
  Synthetic oligonucleotide
gagatggagtagaaggcaaa

SEQ ID NO: 462 - DNA, 20 bp, Artificial sequence
  Synthetic oligonucleotide
taggaaaggaagaatacact

SEQ ID NO: 463 - DNA, 20 bp, Artificial sequence
  Synthetic oligonucleotide
tagaccaggaagggtgagag

SEQ ID NO: 464 - DNA, 20 bp, Artificial sequence
  Synthetic oligonucleotide
aagttggatctggcatgcat

SEQ ID NO: 465 - DNA, 20 bp, Artificial sequence
  Synthetic oligonucleotide
aaagttggatctggcatgca

SEQ ID NO: 466 - DNA, 20 bp, Artificial sequence
  Synthetic oligonucleotide
ccataactcttctaactggg

SEQ ID NO: 467 - DNA, 20 bp, Artificial sequence
  Synthetic oligonucleotide
atattaaagtttgagaacta

SEQ ID NO: 468 - DNA, 20 bp, Artificial sequence
  Synthetic oligonucleotide
cttaactacaaaatgctgga

SEQ ID NO: 469 - DNA, 20 bp, Artificial sequence
  Synthetic oligonucleotide
tgagcagctgtcctcagttc

SEQ ID NO: 470 - DNA, 20 bp, Artificial sequence
  Synthetic oligonucleotide
gagttcataaaagttttact

SEQ ID NO: 471 - DNA, 20 bp, Artificial sequence
  Synthetic oligonucleotide
ctatccacaccattccataa

SEQ ID NO: 472 - DNA, 20 bp, Artificial sequence
  Synthetic oligonucleotide
aacatctaagtaatgcaaac

SEQ ID NO: 473 - DNA, 20 bp, Artificial sequence
  Synthetic oligonucleotide
tttgcattcaaagccctggg

SEQ ID NO: 474 - DNA, 20 bp, Artificial sequence
  Synthetic oligonucleotide
tccatattataggctatgat

SEQ ID NO: 475 - DNA, 20 bp, Artificial sequence
  Synthetic oligonucleotide
attttatgataatgtaaaac

SEQ ID NO: 476 - DNA, 20 bp, Artificial sequence
  Synthetic oligonucleotide
gagatcacattttctgagta

SEQ ID NO: 477 - DNA, 20 bp, Artificial sequence
  Synthetic oligonucleotide
acctccctaggattacctca

SEQ ID NO: 478 - DNA, 20 bp, Artificial sequence
  Synthetic oligonucleotide
aaaatctgatttataatcaa

SEQ ID NO: 479 - DNA, 20 bp, Artificial sequence
  Synthetic oligonucleotide
agcatagattttgacttccc

SEQ ID NO: 480 - DNA, 20 bp, Artificial sequence
  Synthetic oligonucleotide
aaagtcatatacacaggtct

SEQ ID NO: 481 - DNA, 20 bp, Artificial sequence
  Synthetic oligonucleotide
ctcatagcaaattcccagaa

SEQ ID NO: 482 - DNA, 20 bp, Artificial sequence
  Synthetic oligonucleotide
caacatggaggctagcatgt

SEQ ID NO: 483 - DNA, 20 bp, Artificial sequence
  Synthetic oligonucleotide
agactaagtggcctgaatgt

SEQ ID NO: 484 - DNA, 20 bp, Artificial sequence
  Synthetic oligonucleotide
acctaccatgtcactctcaa

SEQ ID NO: 485 - DNA, 20 bp, Artificial sequence
  Synthetic oligonucleotide
aactttcttgtgttttatca

SEQ ID NO: 486 - DNA, 20 bp, Artificial sequence
  Synthetic oligonucleotide
tttgcaagacaaagaaatga

SEQ ID NO: 487 - DNA, 20 bp, Artificial sequence
  Synthetic oligonucleotide
catgcaaagtgttcctcttc

SEQ ID NO: 488 - DNA, 20 bp, Artificial sequence
  Synthetic oligonucleotide
agtgctttgctttctcttat

SEQ ID NO: 489 - DNA, 20 bp, Artificial sequence
  Synthetic oligonucleotide
gaacaagaaacacttggtaa

SEQ ID NO: 490 - DNA, 20 bp, Artificial sequence
  Synthetic oligonucleotide
agtgttccaattaaatggca

SEQ ID NO: 491 - DNA, 20 bp, Artificial sequence
  Synthetic oligonucleotide
aaacaatgcccttgtagtga

SEQ ID NO: 492 - DNA, 20 bp, Artificial sequence
  Synthetic oligonucleotide
tattctaggttttgaggtga

SEQ ID NO: 493 - DNA, 20 bp, Artificial sequence
  Synthetic oligonucleotide
atattctaggttttgaggtg

SEQ ID NO: 494 - DNA, 20 bp, Artificial sequence
  Synthetic oligonucleotide
gttttccattctttaagaaa

SEQ ID NO: 495 - DNA, 20 bp, Artificial sequence
  Synthetic oligonucleotide
agcaatccattgattgtatg

SEQ ID NO: 496 - DNA, 20 bp, Artificial sequence
  Synthetic oligonucleotide
aattatggcaaaatggaaaa

SEQ ID NO: 497 - DNA, 20 bp, Artificial sequence
  Synthetic oligonucleotide
acatttgcttatgagactat

SEQ ID NO: 498 - DNA, 20 bp, Artificial sequence
  Synthetic oligonucleotide
gcagagataatcctatgatg

SEQ ID NO: 499 - DNA, 20 bp, Artificial sequence
  Synthetic oligonucleotide
tccatctgttacctctctgt

SEQ ID NO: 500 - DNA, 20 bp, Artificial sequence
  Synthetic oligonucleotide
tttgcctgaagggcagaacc

SEQ ID NO: 501 - DNA, 20 bp, Artificial sequence
  Synthetic oligonucleotide
gaaaaaatcagattttcaca

SEQ ID NO: 502 - DNA, 20 bp, Artificial sequence
  Synthetic oligonucleotide
aacttaatttaatcatttct

SEQ ID NO: 503 - DNA, 20 bp, Artificial sequence
  Synthetic oligonucleotide
tttggttgtcatgagttgag

SEQ ID NO: 504 - DNA, 20 bp, Artificial sequence
  Synthetic oligonucleotide
ttccatctctagggcacttt

SEQ ID NO: 505 - DNA, 20 bp, Artificial sequence
  Synthetic oligonucleotide
agagcttattttcaaaattc

SEQ ID NO: 506 - DNA, 20 bp, Artificial sequence
  Synthetic oligonucleotide
ataaagagcaaacaaacata

SEQ ID NO: 507 - DNA, 20 bp, Artificial sequence
  Synthetic oligonucleotide
tataaattccttggtctgat

SEQ ID NO: 508 - DNA, 20 bp, Artificial sequence
  Synthetic oligonucleotide
aaaatataaattccttggtc

SEQ ID NO: 509 - DNA, 20 bp, Artificial sequence
  Synthetic oligonucleotide
ttttataacagcctctgaca

SEQ ID NO: 510 - DNA, 20 bp, Artificial sequence
  Synthetic oligonucleotide
aaaagaccatgttgcttatt

SEQ ID NO: 511 - DNA, 20 bp, Artificial sequence
  Synthetic oligonucleotide
atagtcagtcagaatgtggt

SEQ ID NO: 512 - DNA, 20 bp, Artificial sequence
  Synthetic oligonucleotide
tgccttagcttggaaaagac

SEQ ID NO: 513 - DNA, 20 bp, Artificial sequence
  Synthetic oligonucleotide
agggctagctgatgcctctc

SEQ ID NO: 514 - DNA, 20 bp, Artificial sequence
  Synthetic oligonucleotide
ttggactgggctcaaacaga

SEQ ID NO: 515 - DNA, 20 bp, Artificial sequence
  Synthetic oligonucleotide
aaagtcaggctagagggact

SEQ ID NO: 516 - DNA, 20 bp, Artificial sequence
  Synthetic oligonucleotide
tccttgttttcttgtaatga

SEQ ID NO: 517 - DNA, 20 bp, Artificial sequence
  Synthetic oligonucleotide
acaccagaggaaggaaatca

SEQ ID NO: 518 - DNA, 20 bp, Artificial sequence
  Synthetic oligonucleotide
gatgtacaccattttgaatt

SEQ ID NO: 519 - DNA, 20 bp, Artificial sequence
  Synthetic oligonucleotide
tgctctggcctagcctatgt

SEQ ID NO: 520 - DNA, 20 bp, Artificial sequence
  Synthetic oligonucleotide
cagaggtgtctcccaagaaa

SEQ ID NO: 521 - DNA, 20 bp, Artificial sequence
  Synthetic oligonucleotide
aaagagaatggatcaaagct

SEQ ID NO: 522 - DNA, 20 bp, Artificial sequence
  Synthetic oligonucleotide
gatttgcagaacaaatcttg

SEQ ID NO: 523 - DNA, 20 bp, Artificial sequence
  Synthetic oligonucleotide
tggttatgaaggttggacca

SEQ ID NO: 524 - DNA, 20 bp, Artificial sequence
  Synthetic oligonucleotide
tggctaattaatgggcaatt

SEQ ID NO: 525 - DNA, 20 bp, Artificial sequence
  Synthetic oligonucleotide
ctgtgccatattgcctctaa

SEQ ID NO: 526 - DNA, 20 bp, Artificial sequence
  Synthetic oligonucleotide
gatttcaaccagctcacctg

SEQ ID NO: 527 - DNA, 20 bp, Artificial sequence
  Synthetic oligonucleotide
gcaaaagggaaccctgaagc

SEQ ID NO: 528 - DNA, 20 bp, Artificial sequence
  Synthetic oligonucleotide
ctaagtgttataacaaacac

SEQ ID NO: 529 - DNA, 20 bp, Artificial sequence
  Synthetic oligonucleotide
gtccattggtataaaactca

SEQ ID NO: 530 - DNA, 20 bp, Artificial sequence
  Synthetic oligonucleotide
tttcaatacaataagattta

SEQ ID NO: 531 - DNA, 20 bp, Artificial sequence
  Synthetic oligonucleotide
gtccttagacccctcaatgg

SEQ ID NO: 532 - DNA, 20 bp, Artificial sequence
  Synthetic oligonucleotide
gaggatttattcatctaggc

SEQ ID NO: 533 - DNA, 20 bp, Artificial sequence
  Synthetic oligonucleotide
cagtgggaggatcagatatc

SEQ ID NO: 534 - DNA, 20 bp, Artificial sequence
  Synthetic oligonucleotide
atcccatccagcagctggac

SEQ ID NO: 535 - DNA, 20 bp, Artificial sequence
  Synthetic oligonucleotide
aacttgggatgagttactga

SEQ ID NO: 536 - DNA, 20 bp, Artificial sequence
  Synthetic oligonucleotide
gaaggctacctaaaagaaat

SEQ ID NO: 537 - DNA, 20 bp, Artificial sequence
  Synthetic oligonucleotide
aaagaaatattcacaacatt

SEQ ID NO: 538 - DNA, 20 bp, Artificial sequence
  Synthetic oligonucleotide
atgcttatactgctgctgta

SEQ ID NO: 539 - DNA, 20 bp, Artificial sequence
  Synthetic oligonucleotide
tcctcacttcaatcaccttt

SEQ ID NO: 540 - DNA, 20 bp, Artificial sequence
  Synthetic oligonucleotide
ctctttcttcataaataagt

SEQ ID NO: 541 - DNA, 20 bp, Artificial sequence
  Synthetic oligonucleotide
tggtaatctgtgtcccttta

SEQ ID NO: 542 - DNA, 20 bp, Artificial sequence
  Synthetic oligonucleotide
taataaaaaagtttgaaaca

SEQ ID NO: 543 - DNA, 20 bp, Artificial sequence
  Synthetic oligonucleotide
ggtggtggcaagagaaaaat

SEQ ID NO: 544 - DNA, 20 bp, Artificial sequence
  Synthetic oligonucleotide
caaaaggccctttttacatg

SEQ ID NO: 545 - DNA, 20 bp, Artificial sequence
  Synthetic oligonucleotide
actctactggtaccaattta

SEQ ID NO: 546 - DNA, 20 bp, Artificial sequence
  Synthetic oligonucleotide
tctgaacttttatgctctgt

SEQ ID NO: 547 - DNA, 20 bp, Artificial sequence
  Synthetic oligonucleotide
aacttttgcctgggcatcca

SEQ ID NO: 548 - DNA, 20 bp, Artificial sequence
  Synthetic oligonucleotide
tgactccatgtctcacatcc

SEQ ID NO: 549 - DNA, 20 bp, Artificial sequence
  Synthetic oligonucleotide
ttacttcctagatacaacag

SEQ ID NO: 550 - DNA, 20 bp, Artificial sequence
  Synthetic oligonucleotide
ctggcccccatgattcaatt

SEQ ID NO: 551 - DNA, 20 bp, Artificial sequence
  Synthetic oligonucleotide
aagactggcccccatgattc

SEQ ID NO: 552 - DNA, 20 bp, Artificial sequence
  Synthetic oligonucleotide
tgtcactggtctgtgtattt

SEQ ID NO: 553 - DNA, 20 bp, Artificial sequence
  Synthetic oligonucleotide
acagagtagatttagcataa

SEQ ID NO: 554 - DNA, 20 bp, Artificial sequence
  Synthetic oligonucleotide
taaacaggtgtactattaca

SEQ ID NO: 555 - DNA, 20 bp, Artificial sequence
  Synthetic oligonucleotide
gctttatcaactaagtttat

SEQ ID NO: 556 - DNA, 20 bp, Artificial sequence
  Synthetic oligonucleotide
cagaacttcttttaaaattg

SEQ ID NO: 557 - DNA, 20 bp, Artificial sequence
  Synthetic oligonucleotide
gaatacagacataccttgaa

SEQ ID NO: 558 - DNA, 20 bp, Artificial sequence
  Synthetic oligonucleotide
ccatgacaacaatttcagag

SEQ ID NO: 559 - DNA, 20 bp, Artificial sequence
  Synthetic oligonucleotide
acaaatagcaatgaatgggt

SEQ ID NO: 560 - DNA, 20 bp, Artificial sequence
  Synthetic oligonucleotide
caacaaatagcaatgaatgg

SEQ ID NO: 561 - DNA, 20 bp, Artificial sequence
  Synthetic oligonucleotide
gtacacaaatcagtagctct

SEQ ID NO: 562 - DNA, 20 bp, Artificial sequence
  Synthetic oligonucleotide
ctatgtcaaaaagactgaaa

SEQ ID NO: 563 - DNA, 20 bp, Artificial sequence
  Synthetic oligonucleotide
atatacagaacatttcatcc

SEQ ID NO: 564 - DNA, 20 bp, Artificial sequence
  Synthetic oligonucleotide
agaatagataagaactcacc

SEQ ID NO: 565 - DNA, 20 bp, Artificial sequence
  Synthetic oligonucleotide
aggaaagatacagtcatttt

SEQ ID NO: 566 - DNA, 20 bp, Artificial sequence
  Synthetic oligonucleotide
gcacaaagaacacctgggaa

SEQ ID NO: 567 - DNA, 20 bp, Artificial sequence
  Synthetic oligonucleotide
caagaagtctgggattatgt

SEQ ID NO: 568 - DNA, 20 bp, Artificial sequence
  Synthetic oligonucleotide
gttagttattaagctaatca

SEQ ID NO: 569 - DNA, 20 bp, Artificial sequence
  Synthetic oligonucleotide
aaccattatttataggctaa

SEQ ID NO: 570 - DNA, 20 bp, Artificial sequence
  Synthetic oligonucleotide
ccagaatgcgatcacttctt

SEQ ID NO: 571 - DNA, 20 bp, Artificial sequence
  Synthetic oligonucleotide
ccagaaattatcctcctctc

SEQ ID NO: 572 - DNA, 20 bp, Artificial sequence
  Synthetic oligonucleotide
agggaaatgcaaattaaaac

SEQ ID NO: 573 - DNA, 20 bp, Artificial sequence
  Synthetic oligonucleotide
gcatcaagatacagaaaaat

SEQ ID NO: 574 - DNA, 20 bp, Artificial sequence
  Synthetic oligonucleotide
gaatgtttatgagatttttc

SEQ ID NO: 575 - DNA, 20 bp, Artificial sequence
  Synthetic oligonucleotide
gccaattatattgccacatt

SEQ ID NO: 576 - DNA, 20 bp, Artificial sequence
  Synthetic oligonucleotide
atacttgcttatgtagaaat

SEQ ID NO: 577 - DNA, 20 bp, Artificial sequence
  Synthetic oligonucleotide
taatacttgcttatgtagaa

SEQ ID NO: 578 - DNA, 20 bp, Artificial sequence
  Synthetic oligonucleotide
gaacacatggcattctgata

SEQ ID NO: 579 - DNA, 20 bp, Artificial sequence
  Synthetic oligonucleotide
cagaatttgcagtataaatc

SEQ ID NO: 580 - DNA, 20 bp, Artificial sequence
  Synthetic oligonucleotide
tatgttttgaaatcttattt

SEQ ID NO: 581 - DNA, 20 bp, Artificial sequence
  Synthetic oligonucleotide
actcactgctacctcattaa

SEQ ID NO: 582 - DNA, 20 bp, Artificial sequence
  Synthetic oligonucleotide
aagcagtgatagggtatctg

SEQ ID NO: 583 - DNA, 20 bp, Artificial sequence
  Synthetic oligonucleotide
atgaggcctattacaatgga

SEQ ID NO: 584 - DNA, 20 bp, Artificial sequence
  Synthetic oligonucleotide
ctggagtctcatgaggccta

SEQ ID NO: 585 - DNA, 20 bp, Artificial sequence
  Synthetic oligonucleotide
tgactatcagccttttaatc

SEQ ID NO: 586 - DNA, 20 bp, Artificial sequence
  Synthetic oligonucleotide
ttcagagaacaacctttgaa

SEQ ID NO: 587 - DNA, 20 bp, Artificial sequence
  Synthetic oligonucleotide
agccatgtgtgatctgatgt

SEQ ID NO: 588 - DNA, 20 bp, Artificial sequence
  Synthetic oligonucleotide
gaaatttactccaaactagc

SEQ ID NO: 589 - DNA, 20 bp, Artificial sequence
  Synthetic oligonucleotide
aacatccagaccaccatcta

SEQ ID NO: 590 - DNA, 20 bp, Artificial sequence
  Synthetic oligonucleotide
gtaccaaaccattcatgctc

SEQ ID NO: 591 - DNA, 20 bp, Artificial sequence
  Synthetic oligonucleotide
agtaccaaaccattcatgct

SEQ ID NO: 592 - DNA, 20 bp, Artificial sequence
  Synthetic oligonucleotide
ttatagagcttgagattgac

SEQ ID NO: 593 - DNA, 20 bp, Artificial sequence
  Synthetic oligonucleotide
agtccattatagagcttgag

SEQ ID NO: 594 - DNA, 20 bp, Artificial sequence
  Synthetic oligonucleotide
aaccatgagatgcaatgcag

SEQ ID NO: 595 - DNA, 20 bp, Artificial sequence
  Synthetic oligonucleotide
aggattgagaatcgctgatt

SEQ ID NO: 596 - DNA, 20 bp, Artificial sequence
  Synthetic oligonucleotide
tctaaagcatggccaggatt

SEQ ID NO: 597 - DNA, 20 bp, Artificial sequence
  Synthetic oligonucleotide
gggactgagtattgatactt

SEQ ID NO: 598 - DNA, 20 bp, Artificial sequence
  Synthetic oligonucleotide
agaagtagggtgttccagat

SEQ ID NO: 599 - DNA, 20 bp, Artificial sequence
  Synthetic oligonucleotide
agaaatagtcttcctactaa

SEQ ID NO: 600 - DNA, 20 bp, Artificial sequence
  Synthetic oligonucleotide
gcctcctttaagcttctatg

SEQ ID NO: 601 - DNA, 20 bp, Artificial sequence
  Synthetic oligonucleotide
ggcctgcctttactttccca

SEQ ID NO: 602 - DNA, 20 bp, Artificial sequence
  Synthetic oligonucleotide
acctcagtggactctttcca

SEQ ID NO: 603 - DNA, 20 bp, Artificial sequence
  Synthetic oligonucleotide
caaacctaagttcaagtcct

SEQ ID NO: 604 - DNA, 20 bp, Artificial sequence
  Synthetic oligonucleotide
agtttcacttcttgaatcaa

SEQ ID NO: 605 - DNA, 20 bp, Artificial sequence
  Synthetic oligonucleotide
aagatcaaatgaggtcaagg

SEQ ID NO: 606 - DNA, 20 bp, Artificial sequence
  Synthetic oligonucleotide
tagatacaaatttcatcaca

SEQ ID NO: 607 - DNA, 20 bp, Artificial sequence
  Synthetic oligonucleotide
attcctaaaataggagcagg

SEQ ID NO: 608 - DNA, 20 bp, Artificial sequence
  Synthetic oligonucleotide
tttttatgttgtataagata

SEQ ID NO: 609 - DNA, 20 bp, Artificial sequence
  Synthetic oligonucleotide
gttcagccaatacatgagta

SEQ ID NO: 610 - DNA, 20 bp, Artificial sequence
  Synthetic oligonucleotide
ccagagggagttcattacca

SEQ ID NO: 611 - DNA, 20 bp, Artificial sequence
  Synthetic oligonucleotide
tctctctaattcaaccttat

SEQ ID NO: 612 - DNA, 20 bp, Artificial sequence
  Synthetic oligonucleotide
ataatcctcagacctcttta

SEQ ID NO: 613 - DNA, 20 bp, Artificial sequence
  Synthetic oligonucleotide
cactgtggcagaattccaag

SEQ ID NO: 614 - DNA, 20 bp, Artificial sequence
  Synthetic oligonucleotide
acaccttggtgcctagaagc

SEQ ID NO: 615 - DNA, 20 bp, Artificial sequence
  Synthetic oligonucleotide
gtagcaatgacacctaagaa

SEQ ID NO: 616 - DNA, 20 bp, Artificial sequence
  Synthetic oligonucleotide
tttaaaataataaatgctta

SEQ ID NO: 617 - DNA, 20 bp, Artificial sequence
  Synthetic oligonucleotide
tcatttggtccttagacccc

SEQ ID NO: 618 - DNA, 20 bp, Artificial sequence
  Synthetic oligonucleotide
ttattcatctaggccgagtg

SEQ ID NO: 619 - DNA, 20 bp, Artificial sequence
  Synthetic oligonucleotide
ttgcagaatcttctctttgg

SEQ ID NO: 620 - DNA, 20 bp, Artificial sequence
  Synthetic oligonucleotide
accataaagctatgccataa

SEQ ID NO: 621 - DNA, 20 bp, Artificial sequence
  Synthetic oligonucleotide
ggcaaggagcacaataggac

SEQ ID NO: 622 - DNA, 20 bp, Artificial sequence
  Synthetic oligonucleotide
acccaaaaagttgagctgag

SEQ ID NO: 623 - DNA, 20 bp, Artificial sequence
  Synthetic oligonucleotide
tagattttcagactctttct

SEQ ID NO: 624 - DNA, 20 bp, Artificial sequence
  Synthetic oligonucleotide
aatttcaatattgttgtgtt

SEQ ID NO: 625 - DNA, 20 bp, Artificial sequence
  Synthetic oligonucleotide
atgcttttaatggcacccaa

SEQ ID NO: 626 - DNA, 20 bp, Artificial sequence
  Synthetic oligonucleotide
catgtctcacatccaggtca

SEQ ID NO: 627 - DNA, 20 bp, Artificial sequence
  Synthetic oligonucleotide
ttcactggagtagactttta

SEQ ID NO: 628 - DNA, 20 bp, Artificial sequence
  Synthetic oligonucleotide
cttataagggaggtctggta

SEQ ID NO: 629 - DNA, 20 bp, Artificial sequence
  Synthetic oligonucleotide
gcataattcttaagggccct

SEQ ID NO: 630 - DNA, 20 bp, Artificial sequence
  Synthetic oligonucleotide
ccacagaacttcttttaaaa

SEQ ID NO: 631 - DNA, 20 bp, Artificial sequence
  Synthetic oligonucleotide
ggtgaccatgattttaacaa

SEQ ID NO: 632 - DNA, 20 bp, Artificial sequence
  Synthetic oligonucleotide
aacagctgcatgacaatttt

SEQ ID NO: 633 - DNA, 20 bp, Artificial sequence
  Synthetic oligonucleotide
agaaacagaatcagtgactt

SEQ ID NO: 634 - DNA, 20 bp, Artificial sequence
  Synthetic oligonucleotide
cagattccagagaaaagcca

SEQ ID NO: 635 - DNA, 20 bp, Artificial sequence
  Synthetic oligonucleotide
tgtgagaagaactctatcac

SEQ ID NO: 636 - DNA, 20 bp, Artificial sequence
  Synthetic oligonucleotide
ctcacaaatcaccactaaag

SEQ ID NO: 637 - DNA, 20 bp, Artificial sequence
  Synthetic oligonucleotide
caacgagtggataaagaaac

SEQ ID NO: 638 - DNA, 20 bp, Artificial sequence
  Synthetic oligonucleotide
ataaaactggatcctcatct

SEQ ID NO: 639 - DNA, 20 bp, Artificial sequence
  Synthetic oligonucleotide
attaaaactctcagcaaaat

SEQ ID NO: 640 - DNA, 20 bp, Artificial sequence
  Synthetic oligonucleotide
aaagactgaaagaacacaaa

SEQ ID NO: 641 - DNA, 20 bp, Artificial sequence
  Synthetic oligonucleotide
tatctgctgccttcaggaga

SEQ ID NO: 642 - DNA, 20 bp, Artificial sequence
  Synthetic oligonucleotide
tttgaattaacccaattcaa

SEQ ID NO: 643 - DNA, 20 bp, Artificial sequence
  Synthetic oligonucleotide
tcttaatttacaacagagga

SEQ ID NO: 644 - DNA, 20 bp, Artificial sequence
  Synthetic oligonucleotide
agaaaagtgacaggcttccc

SEQ ID NO: 645 - DNA, 20 bp, Artificial sequence
  Synthetic oligonucleotide
atgttccttgaagatcccaa

SEQ ID NO: 646 - DNA, 20 bp, Artificial sequence
  Synthetic oligonucleotide
atgaataacacttgccacaa

SEQ ID NO: 647 - DNA, 20 bp, Artificial sequence
  Synthetic oligonucleotide
gtatgtttatcacagcacag

SEQ ID NO: 648 - DNA, 20 bp, Artificial sequence
  Synthetic oligonucleotide
aaacactgcaatattaggtt

SEQ ID NO: 649 - DNA, 20 bp, Artificial sequence
  Synthetic oligonucleotide
gattggtgcttttcaaactg

SEQ ID NO: 650 - DNA, 20 bp, Artificial sequence
  Synthetic oligonucleotide
atttgtaagacaaacatgaa

SEQ ID NO: 651 - DNA, 20 bp, Artificial sequence
  Synthetic oligonucleotide
tcacatgactatgttctggc

SEQ ID NO: 652 - DNA, 20 bp, Artificial sequence
  Synthetic oligonucleotide
agtcctgtccacactattaa

SEQ ID NO: 653 - DNA, 20 bp, Artificial sequence
  Synthetic oligonucleotide
ctgggctctgcctgctgaac

SEQ ID NO: 654 - DNA, 20 bp, Artificial sequence
  Synthetic oligonucleotide
aaaacccttaagtatttcct

SEQ ID NO: 655 - DNA, 20 bp, Artificial sequence
  Synthetic oligonucleotide
ctctgtttcaaaccccccag

SEQ ID NO: 656 - DNA, 20 bp, Artificial sequence
  Synthetic oligonucleotide
ggacagaacaccaatcacaa

SEQ ID NO: 657 - DNA, 20 bp, Artificial sequence
  Synthetic oligonucleotide
acctacccttcaaagtcacg

SEQ ID NO: 658 - DNA, 20 bp, Artificial sequence
  Synthetic oligonucleotide
ttcagttcccaggaggctta

SEQ ID NO: 659 - DNA, 20 bp, Artificial sequence
  Synthetic oligonucleotide
ttttgcaatgtctagcaatt

SEQ ID NO: 660 - DNA, 20 bp, Artificial sequence
  Synthetic oligonucleotide
attaagatcagaaaatatta

SEQ ID NO: 661 - DNA, 20 bp, Artificial sequence
  Synthetic oligonucleotide
ttaatgagatattttgcacc

SEQ ID NO: 662 - DNA, 20 bp, Artificial sequence
  Synthetic oligonucleotide
gagaggttaagtaaatctcc

SEQ ID NO: 663 - DNA, 20 bp, Artificial sequence
  Synthetic oligonucleotide
cagactcaaatttgaaaatt

SEQ ID NO: 664 - DNA, 20 bp, Artificial sequence
  Synthetic oligonucleotide
gataaggcaataatacagcc

SEQ ID NO: 665 - DNA, 20 bp, Artificial sequence
  Synthetic oligonucleotide
atcatttgccaatttctgtg

SEQ ID NO: 666 - DNA, 20 bp, Artificial sequence
  Synthetic oligonucleotide
caagaagaaaagatgcaaaa

SEQ ID NO: 667 - DNA, 20 bp, Artificial sequence
  Synthetic oligonucleotide
aatttatttccttcctatga

SEQ ID NO: 668 - DNA, 20 bp, Artificial sequence
  Synthetic oligonucleotide
ttttggaaatgtgagaaacg

SEQ ID NO: 669 - DNA, 20 bp, Artificial sequence
  Synthetic oligonucleotide
aaacacatgagaaaagatga

SEQ ID NO: 670 - DNA, 20 bp, Artificial sequence
  Synthetic oligonucleotide
tgttggctcagtgggaatga

SEQ ID NO: 671 - DNA, 20 bp, Artificial sequence
  Synthetic oligonucleotide
tgaacaggtttgcatttctc

SEQ ID NO: 672 - DNA, 20 bp, Artificial sequence
  Synthetic oligonucleotide
tcctaggtgaacaggctatg

SEQ ID NO: 673 - DNA, 20 bp, Artificial sequence
  Synthetic oligonucleotide
ccctaatcaggctgaaataa

SEQ ID NO: 674 - DNA, 20 bp, Artificial sequence
  Synthetic oligonucleotide
agggccagtaaggtttgctt

SEQ ID NO: 675 - DNA, 20 bp, Artificial sequence
  Synthetic oligonucleotide
agcctgaattctgagctctg

SEQ ID NO: 676 - DNA, 20 bp, Artificial sequence
  Synthetic oligonucleotide
agaggatctcagctgcaatt

SEQ ID NO: 677 - DNA, 20 bp, Artificial sequence
  Synthetic oligonucleotide
gaaaatccctgctcaagtgc

SEQ ID NO: 678 - DNA, 20 bp, Artificial sequence
  Synthetic oligonucleotide
tgcctgatattgtaattctt

SEQ ID NO: 679 - DNA, 20 bp, Artificial sequence
  Synthetic oligonucleotide
ctcatacagtgaagtcttca

SEQ ID NO: 680 - DNA, 20 bp, Artificial sequence
  Synthetic oligonucleotide
ctcactaagcttgattcact

SEQ ID NO: 681 - DNA, 20 bp, Artificial sequence
  Synthetic oligonucleotide
gatacagaaatcccagtgac

SEQ ID NO: 682 - DNA, 20 bp, Artificial sequence
  Synthetic oligonucleotide
tgtgcttgggtgtacaggca

SEQ ID NO: 683 - DNA, 20 bp, Artificial sequence
  Synthetic oligonucleotide
tcaagcacttacatcatatg

SEQ ID NO: 684 - DNA, 20 bp, Artificial sequence
  Synthetic oligonucleotide
agggttagttattacactta

SEQ ID NO: 685 - DNA, 20 bp, Artificial sequence
  Synthetic oligonucleotide
aggcttcatgtgaggtaaca

SEQ ID NO: 686 - DNA, 20 bp, Artificial sequence
  Synthetic oligonucleotide
tgaaagcttagtacaagaag

SEQ ID NO: 687 - DNA, 20 bp, Artificial sequence
  Synthetic oligonucleotide
ctctcctcttggagatccag

SEQ ID NO: 688 - DNA, 20 bp, Artificial sequence
  Synthetic oligonucleotide
gctgagatttctctcctctt

SEQ ID NO: 689 - DNA, 20 bp, Artificial sequence
  Synthetic oligonucleotide
cttttgctgagatttctctc

SEQ ID NO: 690 - DNA, 20 bp, Artificial sequence
  Synthetic oligonucleotide
gaacatatgtccatagaatg

SEQ ID NO: 691 - DNA, 20 bp, Artificial sequence
  Synthetic oligonucleotide
gaacaggctatgtaatcaaa

SEQ ID NO: 692 - DNA, 20 bp, Artificial sequence
  Synthetic oligonucleotide
tttttattactgtgcaaacc

SEQ ID NO: 693 - DNA, 20 bp, Artificial sequence
  Synthetic oligonucleotide
actgagggtggaaatggaaa

SEQ ID NO: 694 - DNA, 20 bp, Artificial sequence
  Synthetic oligonucleotide
atgccatacttttcatttca

SEQ ID NO: 695 - DNA, 20 bp, Artificial sequence
  Synthetic oligonucleotide
tctttaaagatttcctatgc

SEQ ID NO: 696 - DNA, 20 bp, Artificial sequence
  Synthetic oligonucleotide
tcacaattaaattatgttta

SEQ ID NO: 697 - DNA, 20 bp, Artificial sequence
  Synthetic oligonucleotide
tttgccatcaccaaacacca

SEQ ID NO: 698 - DNA, 20 bp, Artificial sequence
  Synthetic oligonucleotide
tcagaatgctgaaggatggg

SEQ ID NO: 699 - DNA, 20 bp, Artificial sequence
  Synthetic oligonucleotide
acaattgcaggagagaactg

SEQ ID NO: 700 - DNA, 20 bp, Artificial sequence
  Synthetic oligonucleotide
gttcagtcacctggaaagag

SEQ ID NO: 701 - DNA, 20 bp, Artificial sequence
  Synthetic oligonucleotide
cggagttcagtcacctggaa

SEQ ID NO: 702 - DNA, 20 bp, Artificial sequence
  Synthetic oligonucleotide
aatctaaagttcaatgtcca

SEQ ID NO: 703 - DNA, 20 bp, Artificial sequence
  Synthetic oligonucleotide
ccacctttgggtgaatagca

SEQ ID NO: 704 - DNA, 20 bp, Artificial sequence
  Synthetic oligonucleotide
caacatcaaaagtttccacc

SEQ ID NO: 705 - DNA, 20 bp, Artificial sequence
  Synthetic oligonucleotide
aagcttctatcaaccaactg

SEQ ID NO: 706 - DNA, 20 bp, Artificial sequence
  Synthetic oligonucleotide
accattttctaataattcac

SEQ ID NO: 707 - DNA, 20 bp, Artificial sequence
  Synthetic oligonucleotide
acctgcacttggacaactga

SEQ ID NO: 708 - DNA, 20 bp, Artificial sequence
  Synthetic oligonucleotide
gtcagtgctttggtgatgta

SEQ ID NO: 709 - DNA, 20 bp, Artificial sequence
  Synthetic oligonucleotide
tagaagcacaggaactagag

SEQ ID NO: 710 - DNA, 20 bp, Artificial sequence
  Synthetic oligonucleotide
tttaattttattagaagcac

SEQ ID NO: 711 - DNA, 20 bp, Artificial sequence
  Synthetic oligonucleotide
gagcaagaattaagaaaatc

SEQ ID NO: 712 - DNA, 20 bp, Artificial sequence
  Synthetic oligonucleotide
ctctgcagtcatgtacacaa

SEQ ID NO: 713 - DNA, 20 bp, Artificial sequence
  Synthetic oligonucleotide
gcttggtttgtcaatccttt

SEQ ID NO: 714 - DNA, 20 bp, Artificial sequence
  Synthetic oligonucleotide
gttctcaagcaggagccatt

SEQ ID NO: 715 - DNA, 20 bp, Artificial sequence
  Synthetic oligonucleotide
agggtgatcttccaaaacaa

SEQ ID NO: 716 - DNA, 20 bp, Artificial sequence
  Synthetic oligonucleotide
tctcctatgcttcctttaat

SEQ ID NO: 717 - DNA, 20 bp, Artificial sequence
  Synthetic oligonucleotide
gacataaatatgttcactga

SEQ ID NO: 718 - DNA, 20 bp, Artificial sequence
  Synthetic oligonucleotide
ttactgagtgacagtacagt

SEQ ID NO: 719 - DNA, 20 bp, Artificial sequence
  Synthetic oligonucleotide
ccaggcaccagcacaggcac

SEQ ID NO: 720 - DNA, 20 bp, Artificial sequence
  Synthetic oligonucleotide
ttaatgtcagtagaaagctg

SEQ ID NO: 721 - DNA, 20 bp, Artificial sequence
  Synthetic oligonucleotide
gcaggtggaaagaagatgtc

SEQ ID NO: 722 - DNA, 20 bp, Artificial sequence
  Synthetic oligonucleotide
gccagggtctttacaaagtt

SEQ ID NO: 723 - DNA, 20 bp, Artificial sequence
  Synthetic oligonucleotide
cattacctttgtacatgtac

SEQ ID NO: 724 - DNA, 20 bp, Artificial sequence
  Synthetic oligonucleotide
gaagcaacttctctgaggtc

SEQ ID NO: 725 - DNA, 20 bp, Artificial sequence
  Synthetic oligonucleotide
gcctggcaagaagggccctt

SEQ ID NO: 726 - DNA, 20 bp, Artificial sequence
  Synthetic oligonucleotide
acacatgtttttaaatttat

SEQ ID NO: 727 - DNA, 20 bp, Artificial sequence
  Synthetic oligonucleotide
tcacaatgcactaaaagaaa

SEQ ID NO: 728 - DNA, 20 bp, Artificial sequence
  Synthetic oligonucleotide
tcccaatgacttactgtaga

SEQ ID NO: 729 - DNA, 20 bp, Artificial sequence
  Synthetic oligonucleotide
taagcatttatggaggaatg

SEQ ID NO: 730 - DNA, 20 bp, Artificial sequence
  Synthetic oligonucleotide
tgaggtgggtggccaacagg

SEQ ID NO: 731 - DNA, 20 bp, Artificial sequence
  Synthetic oligonucleotide
gtttttcattttgattgcag

SEQ ID NO: 732 - DNA, 20 bp, Artificial sequence
  Synthetic oligonucleotide
agctcaagtgtttttcattt

SEQ ID NO: 733 - DNA, 20 bp, Artificial sequence
  Synthetic oligonucleotide
caatgtcacagctgtttcct

SEQ ID NO: 734 - DNA, 20 bp, Artificial sequence
  Synthetic oligonucleotide
gaactttggaggcttttaga

SEQ ID NO: 735 - DNA, 20 bp, Artificial sequence
  Synthetic oligonucleotide
tgtatgccccaaactcccat

SEQ ID NO: 736 - DNA, 20 bp, Artificial sequence
  Synthetic oligonucleotide
acacaaataagggaataata

SEQ ID NO: 737 - DNA, 20 bp, Artificial sequence
  Synthetic oligonucleotide
tagttcagccactatggaaa

SEQ ID NO: 738 - DNA, 20 bp, Artificial sequence
  Synthetic oligonucleotide
ctccaaattccagtcctagg

SEQ ID NO: 739 - DNA, 20 bp, Artificial sequence
  Synthetic oligonucleotide
agttggcactgctatatcag

SEQ ID NO: 740 - DNA, 20 bp, Artificial sequence
  Synthetic oligonucleotide
ggccttagattgtaagtttt

SEQ ID NO: 741 - DNA, 20 bp, Artificial sequence
  Synthetic oligonucleotide
ttttagtattattgtaggaa

SEQ ID NO: 742 - DNA, 20 bp, Artificial sequence
  Synthetic oligonucleotide
tttcattaatgaaacctgat

SEQ ID NO: 743 - DNA, 20 bp, Artificial sequence
  Synthetic oligonucleotide
ccctcagctgcctcttcaat

SEQ ID NO: 744 - DNA, 20 bp, Artificial sequence
  Synthetic oligonucleotide
tattgtatcctggcccctaa

SEQ ID NO: 745 - DNA, 20 bp, Artificial sequence
  Synthetic oligonucleotide
agaacaagagcctagaagta

SEQ ID NO: 746 - DNA, 20 bp, Artificial sequence
  Synthetic oligonucleotide
gtgactatgtcactgaattt

SEQ ID NO: 747 - DNA, 20 bp, Artificial sequence
  Synthetic oligonucleotide
gccctacccagcagcctgtg

SEQ ID NO: 748 - DNA, 20 bp, Artificial sequence
  Synthetic oligonucleotide
caaacataaagagagttcca

SEQ ID NO: 749 - DNA, 20 bp, Artificial sequence
  Synthetic oligonucleotide
ctttaaatgaagtagagctc

SEQ ID NO: 750 - DNA, 20 bp, Artificial sequence
  Synthetic oligonucleotide
ctgttcaaagaatgcaggcc

SEQ ID NO: 751 - DNA, 20 bp, Artificial sequence
  Synthetic oligonucleotide
gtctagcctaacagagatat

SEQ ID NO: 752 - DNA, 20 bp, Artificial sequence
  Synthetic oligonucleotide
aaagagtgatgtctagccta

SEQ ID NO: 753 - DNA, 20 bp, Artificial sequence
  Synthetic oligonucleotide
cacttcttactcctttgagg

SEQ ID NO: 754 - DNA, 20 bp, Artificial sequence
  Synthetic oligonucleotide
ttccacaagaaactcagttt

SEQ ID NO: 755 - DNA, 20 bp, Artificial sequence
  Synthetic oligonucleotide
agaaatgccaaagatagctc

SEQ ID NO: 756 - DNA, 20 bp, Artificial sequence
  Synthetic oligonucleotide
agcagaggatctcagctgca

SEQ ID NO: 757 - DNA, 20 bp, Artificial sequence
  Synthetic oligonucleotide
aatccctgctcaagtgctac

SEQ ID NO: 758 - DNA, 20 bp, Artificial sequence
  Synthetic oligonucleotide
aaatccctgctcaagtgcta

SEQ ID NO: 759 - DNA, 20 bp, Artificial sequence
  Synthetic oligonucleotide
aaaatccctgctcaagtgct

SEQ ID NO: 760 - DNA, 20 bp, Artificial sequence
  Synthetic oligonucleotide
agaaaatccctgctcaagtg

SEQ ID NO: 761 - DNA, 20 bp, Artificial sequence
  Synthetic oligonucleotide
aagaaaatccctgctcaagt

SEQ ID NO: 762 - DNA, 20 bp, Artificial sequence
  Synthetic oligonucleotide
caagaaaatccctgctcaag

SEQ ID NO: 763 - DNA, 20 bp, Artificial sequence
  Synthetic oligonucleotide
ctgatattgtaattcttggt

SEQ ID NO: 764 - DNA, 20 bp, Artificial sequence
  Synthetic oligonucleotide
cctgatattgtaattcttgg

SEQ ID NO: 765 - DNA, 20 bp, Artificial sequence
  Synthetic oligonucleotide
gcctgatattgtaattcttg

SEQ ID NO: 766 - DNA, 20 bp, Artificial sequence
  Synthetic oligonucleotide
atgcctgatattgtaattct

SEQ ID NO: 767 - DNA, 20 bp, Artificial sequence
  Synthetic oligonucleotide
aatgcctgatattgtaattc

SEQ ID NO: 768 - DNA, 20 bp, Artificial sequence
  Synthetic oligonucleotide
caatgcctgatattgtaatt

SEQ ID NO: 769 - DNA, 20 bp, Artificial sequence
  Synthetic oligonucleotide
aattatgtgctttgcctgca

SEQ ID NO: 770 - DNA, 20 bp, Artificial sequence
  Synthetic oligonucleotide
caattatgtgctttgcctgc

SEQ ID NO: 771 - DNA, 20 bp, Artificial sequence
  Synthetic oligonucleotide
tcaattatgtgctttgcctg

SEQ ID NO: 772 - DNA, 20 bp, Artificial sequence
  Synthetic oligonucleotide
tgtcaattatgtgctttgcc

SEQ ID NO: 773 - DNA, 20 bp, Artificial sequence
  Synthetic oligonucleotide
atgtcaattatgtgctttgc

SEQ ID NO: 774 - DNA, 20 bp, Artificial sequence
  Synthetic oligonucleotide
gatgtcaattatgtgctttg

SEQ ID NO: 775 - DNA, 20 bp, Artificial sequence
  Synthetic oligonucleotide
ctggtgactctgcctgatga

SEQ ID NO: 776 - DNA, 20 bp, Artificial sequence
  Synthetic oligonucleotide
gctggtgactctgcctgatg

SEQ ID NO: 777 - DNA, 20 bp, Artificial sequence
  Synthetic oligonucleotide
tgctggtgactctgcctgat

SEQ ID NO: 778 - DNA, 20 bp, Artificial sequence
  Synthetic oligonucleotide
gctgctggtgactctgcctg

SEQ ID NO: 779 - DNA, 20 bp, Artificial sequence
  Synthetic oligonucleotide
ggctgctggtgactctgcct

SEQ ID NO: 780 - DNA, 20 bp, Artificial sequence
  Synthetic oligonucleotide
tggctgctggtgactctgcc

SEQ ID NO: 781 - DNA, 20 bp, Artificial sequence
  Synthetic oligonucleotide
gctgaaggatgggcatccag

SEQ ID NO: 782 - DNA, 20 bp, Artificial sequence
  Synthetic oligonucleotide
tgctgaaggatgggcatcca

SEQ ID NO: 783 - DNA, 20 bp, Artificial sequence
  Synthetic oligonucleotide
atgctgaaggatgggcatcc

SEQ ID NO: 784 - DNA, 20 bp, Artificial sequence
  Synthetic oligonucleotide
gaatgctgaaggatgggcat

SEQ ID NO: 785 - DNA, 20 bp, Artificial sequence
  Synthetic oligonucleotide
agaatgctgaaggatgggca

SEQ ID NO: 786 - DNA, 20 bp, Artificial sequence
  Synthetic oligonucleotide
cagaatgctgaaggatgggc

SEQ ID NO: 787 - DNA, 20 bp, Artificial sequence
  Synthetic oligonucleotide
tccagtagtcaatattattt

SEQ ID NO: 788 - DNA, 20 bp, Artificial sequence
  Synthetic oligonucleotide
atccagtagtcaatattatt

SEQ ID NO: 789 - DNA, 20 bp, Artificial sequence
  Synthetic oligonucleotide
tatccagtagtcaatattat

SEQ ID NO: 790 - DNA, 20 bp, Artificial sequence
  Synthetic oligonucleotide
gttatccagtagtcaatatt

SEQ ID NO: 791 - DNA, 20 bp, Artificial sequence
  Synthetic oligonucleotide
ggttatccagtagtcaatat

SEQ ID NO: 792 - DNA, 20 bp, Artificial sequence
  Synthetic oligonucleotide
tggttatccagtagtcaata

SEQ ID NO: 793 - DNA, 20 bp, Artificial sequence
  Synthetic oligonucleotide
caacttgaggacaataagag

SEQ ID NO: 794 - DNA, 20 bp, Artificial sequence
  Synthetic oligonucleotide
tcaacttgaggacaataaga

SEQ ID NO: 795 - DNA, 20 bp, Artificial sequence
  Synthetic oligonucleotide
ctcaacttgaggacaataag

SEQ ID NO: 796 - DNA, 20 bp, Artificial sequence
  Synthetic oligonucleotide
aactcaacttgaggacaata

SEQ ID NO: 797 - DNA, 20 bp, Artificial sequence
  Synthetic oligonucleotide
taactcaacttgaggacaat

SEQ ID NO: 798 - DNA, 20 bp, Artificial sequence
  Synthetic oligonucleotide
ataactcaacttgaggacaa

SEQ ID NO: 799 - DNA, 20 bp, Artificial sequence
  Synthetic oligonucleotide
caggaagaaaggaaccttag

SEQ ID NO: 800 - DNA, 20 bp, Artificial sequence
  Synthetic oligonucleotide
ccaggaagaaaggaacctta

SEQ ID NO: 801 - DNA, 20 bp, Artificial sequence
  Synthetic oligonucleotide
accaggaagaaaggaacctt

SEQ ID NO: 802 - DNA, 20 bp, Artificial sequence
  Synthetic oligonucleotide
agaccaggaagaaaggaacc

SEQ ID NO: 803 - DNA, 20 bp, Artificial sequence
  Synthetic oligonucleotide
tagaccaggaagaaaggaac

SEQ ID NO: 804 - DNA, 20 bp, Artificial sequence
  Synthetic oligonucleotide
atagaccaggaagaaaggaa

SEQ ID NO: 805 - DNA, 20 bp, Artificial sequence
  Synthetic oligonucleotide
tacaatgcacaggacacgcc

SEQ ID NO: 806 - DNA, 20 bp, Artificial sequence
  Synthetic oligonucleotide
ctacaatgcacaggacacgc

SEQ ID NO: 807 - DNA, 20 bp, Artificial sequence
  Synthetic oligonucleotide
gctacaatgcacaggacacg

SEQ ID NO: 808 - DNA, 20 bp, Artificial sequence
  Synthetic oligonucleotide
atgctacaatgcacaggaca

SEQ ID NO: 809 - DNA, 20 bp, Artificial sequence
  Synthetic oligonucleotide
tatgctacaatgcacaggac

SEQ ID NO: 810 - DNA, 20 bp, Artificial sequence
  Synthetic oligonucleotide
atatgctacaatgcacagga

SEQ ID NO: 811 - DNA, 20 bp, Artificial sequence
  Synthetic oligonucleotide
ctgatatttattgctgtacg

SEQ ID NO: 812 - DNA, 20 bp, Artificial sequence
  Synthetic oligonucleotide
ctctgatatttattgctgta

SEQ ID NO: 813 - DNA, 20 bp, Artificial sequence
  Synthetic oligonucleotide
tctctgatatttattgctgt

SEQ ID NO: 814 - DNA, 20 bp, Artificial sequence
  Synthetic oligonucleotide
gtctctgatatttattgctg

SEQ ID NO: 815 - DNA, 20 bp, Artificial sequence
  Synthetic oligonucleotide
ccagaagaattacccatgca

SEQ ID NO: 816 - DNA, 20 bp, Artificial sequence
  Synthetic oligonucleotide
tccagaagaattacccatgc

SEQ ID NO: 817 - DNA, 20 bp, Artificial sequence
  Synthetic oligonucleotide
ttccagaagaattacccatg

SEQ ID NO: 818 - DNA, 20 bp, Artificial sequence
  Synthetic oligonucleotide
tcttccagaagaattaccca

SEQ ID NO: 819 - DNA, 20 bp, Artificial sequence
  Synthetic oligonucleotide
atcttccagaagaattaccc

SEQ ID NO: 820 - DNA, 20 bp, Artificial sequence
  Synthetic oligonucleotide
catcttccagaagaattacc

SEQ ID NO: 821 - DNA, 20 bp, Artificial sequence
  Synthetic oligonucleotide
tttctgcagtatcctagcct

SEQ ID NO: 822 - DNA, 20 bp, Artificial sequence
  Synthetic oligonucleotide
gtttctgcagtatcctagcc

SEQ ID NO: 823 - DNA, 20 bp, Artificial sequence
  Synthetic oligonucleotide
agtttctgcagtatcctagc

SEQ ID NO: 824 - DNA, 20 bp, Artificial sequence
  Synthetic oligonucleotide
tcagtttctgcagtatccta

SEQ ID NO: 825 - DNA, 20 bp, Artificial sequence
  Synthetic oligonucleotide
ttcagtttctgcagtatcct

SEQ ID NO: 826 - DNA, 20 bp, Artificial sequence
  Synthetic oligonucleotide
tttcagtttctgcagtatcc

SEQ ID NO: 827 - DNA, 20 bp, Artificial sequence
  Synthetic oligonucleotide
gtttccattttcttgattcc

SEQ ID NO: 828 - DNA, 20 bp, Artificial sequence
  Synthetic oligonucleotide
tgtttccattttcttgattc

SEQ ID NO: 829 - DNA, 20 bp, Artificial sequence
  Synthetic oligonucleotide
gtgtttccattttcttgatt

SEQ ID NO: 830 - DNA, 20 bp, Artificial sequence
  Synthetic oligonucleotide
tggtgtttccattttcttga

SEQ ID NO: 831 - DNA, 20 bp, Artificial sequence
  Synthetic oligonucleotide
atggtgtttccattttcttg

SEQ ID NO: 832 - DNA, 20 bp, Artificial sequence
  Synthetic oligonucleotide
aatggtgtttccattttctt

SEQ ID NO: 833 - DNA, 20 bp, Artificial sequence
  Synthetic oligonucleotide
aacccatttcatccatttaa

SEQ ID NO: 834 - DNA, 20 bp, Artificial sequence
  Synthetic oligonucleotide
gaacccatttcatccattta

SEQ ID NO: 835 - DNA, 20 bp, Artificial sequence
  Synthetic oligonucleotide
ggaacccatttcatccattt

SEQ ID NO: 836 - DNA, 20 bp, Artificial sequence
  Synthetic oligonucleotide
taggaacccatttcatccat

SEQ ID NO: 837 - DNA, 20 bp, Artificial sequence
  Synthetic oligonucleotide
gtaggaacccatttcatcca

SEQ ID NO: 838 - DNA, 20 bp, Artificial sequence
  Synthetic oligonucleotide
ggtaggaacccatttcatcc

SEQ ID NO: 839 - DNA, 20 bp, Artificial sequence
  Synthetic oligonucleotide
tgagggattgcctcagtagc

SEQ ID NO: 840 - DNA, 20 bp, Artificial sequence
  Synthetic oligonucleotide
ttgagggattgcctcagtag

SEQ ID NO: 841 - DNA, 20 bp, Artificial sequence
  Synthetic oligonucleotide
tttgagggattgcctcagta

SEQ ID NO: 842 - DNA, 20 bp, Artificial sequence
  Synthetic oligonucleotide
cctttgagggattgcctcag

SEQ ID NO: 843 - DNA, 20 bp, Artificial sequence
  Synthetic oligonucleotide
tcctttgagggattgcctca

SEQ ID NO: 844 - DNA, 20 bp, Artificial sequence
  Synthetic oligonucleotide
ctcctttgagggattgcctc

SEQ ID NO: 845 - DNA, 20 bp, Artificial sequence
  Synthetic oligonucleotide
aacttaggacttgggacatt

SEQ ID NO: 846 - DNA, 20 bp, Artificial sequence
  Synthetic oligonucleotide
taacttaggacttgggacat

SEQ ID NO: 847 - DNA, 20 bp, Artificial sequence
  Synthetic oligonucleotide
ctaacttaggacttgggaca

SEQ ID NO: 848 - DNA, 20 bp, Artificial sequence
  Synthetic oligonucleotide
cactaacttaggacttggga

SEQ ID NO: 849 - DNA, 20 bp, Artificial sequence
  Synthetic oligonucleotide
tcactaacttaggacttggg

SEQ ID NO: 850 - DNA, 20 bp, Artificial sequence
  Synthetic oligonucleotide
gtcactaacttaggacttgg

SEQ ID NO: 851 - DNA, 20 bp, Artificial sequence
  Synthetic oligonucleotide
tgggctagatcaggattggt

SEQ ID NO: 852 - DNA, 20 bp, Artificial sequence
  Synthetic oligonucleotide
atgggctagatcaggattgg

SEQ ID NO: 853 - DNA, 20 bp, Artificial sequence
  Synthetic oligonucleotide
catgggctagatcaggattg

SEQ ID NO: 854 - DNA, 20 bp, Artificial sequence
  Synthetic oligonucleotide
accatgggctagatcaggat

SEQ ID NO: 855 - DNA, 20 bp, Artificial sequence
  Synthetic oligonucleotide
taccatgggctagatcagga

SEQ ID NO: 856 - DNA, 20 bp, Artificial sequence
  Synthetic oligonucleotide
ctaccatgggctagatcagg

SEQ ID NO: 857 - DNA, 20 bp, Artificial sequence
  Synthetic oligonucleotide
atgagcttagcagtcactta

SEQ ID NO: 858 - DNA, 20 bp, Artificial sequence
  Synthetic oligonucleotide
catgagcttagcagtcactt

SEQ ID NO: 859 - DNA, 20 bp, Artificial sequence
  Synthetic oligonucleotide
ccatgagcttagcagtcact

SEQ ID NO: 860 - DNA, 20 bp, Artificial sequence
  Synthetic oligonucleotide
gtctcagcaaacctgggata

SEQ ID NO: 861 - DNA, 20 bp, Artificial sequence
  Synthetic oligonucleotide
tgtctcagcaaacctgggat

SEQ ID NO: 862 - DNA, 20 bp, Artificial sequence
  Synthetic oligonucleotide
atgtctcagcaaacctggga

SEQ ID NO: 863 - DNA, 20 bp, Artificial sequence
  Synthetic oligonucleotide
gaatgtctcagcaaacctgg

SEQ ID NO: 864 - DNA, 20 bp, Artificial sequence
  Synthetic oligonucleotide
ggaatgtctcagcaaacctg

SEQ ID NO: 865 - DNA, 20 bp, Artificial sequence
  Synthetic oligonucleotide
aggaatgtctcagcaaacct

SEQ ID NO: 866 - DNA, 20 bp, Artificial sequence
  Synthetic oligonucleotide
tacagacatagctctaacct

SEQ ID NO: 867 - DNA, 20 bp, Artificial sequence
  Synthetic oligonucleotide
atacagacatagctctaacc

SEQ ID NO: 868 - DNA, 20 bp, Artificial sequence
  Synthetic oligonucleotide
gatacagacatagctctaac

SEQ ID NO: 869 - DNA, 20 bp, Artificial sequence
  Synthetic oligonucleotide
tggatacagacatagctcta

SEQ ID NO: 870 - DNA, 20 bp, Artificial sequence
  Synthetic oligonucleotide
ctggatacagacatagctct

SEQ ID NO: 871 - DNA, 20 bp, Artificial sequence
  Synthetic oligonucleotide
gctggatacagacatagctc

SEQ ID NO: 872 - DNA, 20 bp, Artificial sequence
  Synthetic oligonucleotide
acactgtttgtgagggtcaa

SEQ ID NO: 873 - DNA, 20 bp, Artificial sequence
  Synthetic oligonucleotide
aacactgtttgtgagggtca

SEQ ID NO: 874 - DNA, 20 bp, Artificial sequence
  Synthetic oligonucleotide
caacactgtttgtgagggtc

SEQ ID NO: 875 - DNA, 20 bp, Artificial sequence
  Synthetic oligonucleotide
aacaacactgtttgtgaggg

SEQ ID NO: 876 - DNA, 20 bp, Artificial sequence
  Synthetic oligonucleotide
aaacaacactgtttgtgagg

SEQ ID NO: 877 - DNA, 20 bp, Artificial sequence
  Synthetic oligonucleotide
caaacaacactgtttgtgag

SEQ ID NO: 878 - DNA, 20 bp, Artificial sequence
  Synthetic oligonucleotide
ttcaagtttaggatctgcag

SEQ ID NO: 879 - DNA, 20 bp, Artificial sequence
  Synthetic oligonucleotide
cttcaagtttaggatctgca

SEQ ID NO: 880 - DNA, 20 bp, Artificial sequence
  Synthetic oligonucleotide
gcttcaagtttaggatctgc

SEQ ID NO: 881 - DNA, 20 bp, Artificial sequence
  Synthetic oligonucleotide
gggcttcaagtttaggatct

SEQ ID NO: 882 - DNA, 20 bp, Artificial sequence
  Synthetic oligonucleotide
agggcttcaagtttaggatc

SEQ ID NO: 883 - DNA, 20 bp, Artificial sequence
  Synthetic oligonucleotide
cagggcttcaagtttaggat

SEQ ID NO: 884 - DNA, 20 bp, Artificial sequence
  Synthetic oligonucleotide
tgtggctttaattcactaat

SEQ ID NO: 885 - DNA, 20 bp, Artificial sequence
  Synthetic oligonucleotide
atgtggctttaattcactaa

SEQ ID NO: 886 - DNA, 20 bp, Artificial sequence
  Synthetic oligonucleotide
tatgtggctttaattcacta

SEQ ID NO: 887 - DNA, 20 bp, Artificial sequence
  Synthetic oligonucleotide
ggtatgtggctttaattcac

SEQ ID NO: 888 - DNA, 20 bp, Artificial sequence
  Synthetic oligonucleotide
tggtatgtggctttaattca

SEQ ID NO: 889 - DNA, 20 bp, Artificial sequence
  Synthetic oligonucleotide
gtggtatgtggctttaattc

SEQ ID NO: 890 - DNA, 20 bp, Artificial sequence
  Synthetic oligonucleotide
tctgtgttcagttgcatcac

SEQ ID NO: 891 - DNA, 20 bp, Artificial sequence
  Synthetic oligonucleotide
ttctgtgttcagttgcatca

SEQ ID NO: 892 - DNA, 20 bp, Artificial sequence
  Synthetic oligonucleotide
gttctgtgttcagttgcatc

SEQ ID NO: 893 - DNA, 20 bp, Artificial sequence
  Synthetic oligonucleotide
gtactcatgaggaggcactt

SEQ ID NO: 894 - DNA, 20 bp, Artificial sequence
  Synthetic oligonucleotide
ggtactcatgaggaggcact

SEQ ID NO: 895 - DNA, 20 bp, Artificial sequence
  Synthetic oligonucleotide
tggtactcatgaggaggcac

SEQ ID NO: 896 - DNA, 20 bp, Artificial sequence
  Synthetic oligonucleotide
attggtactcatgaggaggc

SEQ ID NO: 897 - DNA, 20 bp, Artificial sequence
  Synthetic oligonucleotide
aattggtactcatgaggagg

SEQ ID NO: 898 - DNA, 20 bp, Artificial sequence
  Synthetic oligonucleotide
caattggtactcatgaggag

SEQ ID NO: 899 - DNA, 20 bp, Artificial sequence
  Synthetic oligonucleotide
aaactctgcaactccaaccc

SEQ ID NO: 900 - DNA, 20 bp, Artificial sequence
  Synthetic oligonucleotide
gaaactctgcaactccaacc

SEQ ID NO: 901 - DNA, 20 bp, Artificial sequence
  Synthetic oligonucleotide
ggaaactctgcaactccaac

SEQ ID NO: 902 - DNA, 20 bp, Artificial sequence
  Synthetic oligonucleotide
atggaaactctgcaactcca

SEQ ID NO: 903 - DNA, 20 bp, Artificial sequence
  Synthetic oligonucleotide
catggaaactctgcaactcc

SEQ ID NO: 904 - DNA, 20 bp, Artificial sequence
  Synthetic oligonucleotide
tcatggaaactctgcaactc

SEQ ID NO: 905 - DNA, 20 bp, Artificial sequence
  Synthetic oligonucleotide
acatctggatgtgaggctcg

SEQ ID NO: 906 - DNA, 20 bp, Artificial sequence
  Synthetic oligonucleotide
cacatctggatgtgaggctc

SEQ ID NO: 907 - DNA, 20 bp, Artificial sequence
  Synthetic oligonucleotide
gtcacatctggatgtgaggc

SEQ ID NO: 908 - DNA, 20 bp, Artificial sequence
  Synthetic oligonucleotide
tgtcacatctggatgtgagg

SEQ ID NO: 909 - DNA, 20 bp, Artificial sequence
  Synthetic oligonucleotide
ctgtcacatctggatgtgag

SEQ ID NO: 910 - DNA, 20 bp, Artificial sequence
  Synthetic oligonucleotide
gtcaattatgtgctttgcct

SEQ ID NO: 911 - DNA, 20 bp, Artificial sequence
  Synthetic oligonucleotide
acattcaaaattcttccttg

SEQ ID NO: 912 - DNA, 20 bp, Artificial sequence
  Synthetic oligonucleotide
atcctgcatatattttattg

SEQ ID NO: 913 - DNA, 20 bp, Artificial sequence
  Synthetic oligonucleotide
ctgctggtgactctgcctga

SEQ ID NO: 914 - DNA, 20 bp, Artificial sequence
  Synthetic oligonucleotide
aatgctgaaggatgggcatc

SEQ ID NO: 915 - DNA, 20 bp, Artificial sequence
  Synthetic oligonucleotide
ttatccagtagtcaatatta

SEQ ID NO: 916 - DNA, 20 bp, Artificial sequence
  Synthetic oligonucleotide
tctcatgttaaagttcttaa

SEQ ID NO: 917 - DNA, 20 bp, Artificial sequence
  Synthetic oligonucleotide
tgcacttggacaactgatag

SEQ ID NO: 918 - DNA, 20 bp, Artificial sequence
  Synthetic oligonucleotide
actcaacttgaggacaataa

SEQ ID NO: 919 - DNA, 20 bp, Artificial sequence
  Synthetic oligonucleotide
gaccaggaagaaaggaacct

SEQ ID NO: 920 - DNA, 20 bp, Artificial sequence
  Synthetic oligonucleotide
tgctacaatgcacaggacac

SEQ ID NO: 921 - DNA, 20 bp, Artificial sequence
  Synthetic oligonucleotide
tctgatatttattgctgtac

SEQ ID NO: 922 - DNA, 20 bp, Artificial sequence
  Synthetic oligonucleotide
atgcttcctttaataaatgt

SEQ ID NO: 923 - DNA, 20 bp, Artificial sequence
  Synthetic oligonucleotide
aacatttagaacctaggaga

SEQ ID NO: 924 - DNA, 20 bp, Artificial sequence
  Synthetic oligonucleotide
caagcttgcaagtaggaaaa

SEQ ID NO: 925 - DNA, 20 bp, Artificial sequence
  Synthetic oligonucleotide
ccaggctgttcatgccaagg

SEQ ID NO: 926 - DNA, 20 bp, Artificial sequence
  Synthetic oligonucleotide
cctgccaagggcaagccagg

SEQ ID NO: 927 - DNA, 20 bp, Artificial sequence
  Synthetic oligonucleotide
tttcacctggtgactggaag

SEQ ID NO: 928 - DNA, 20 bp, Artificial sequence
  Synthetic oligonucleotide
attttctaccatcaaagaga

SEQ ID NO: 929 - DNA, 20 bp, Artificial sequence
  Synthetic oligonucleotide
gattaagttttctttaaaaa

SEQ ID NO: 930 - DNA, 20 bp, Artificial sequence
  Synthetic oligonucleotide
cttccagaagaattacccat

SEQ ID NO: 931 - DNA, 20 bp, Artificial sequence
  Synthetic oligonucleotide
cagtttctgcagtatcctag

SEQ ID NO: 932 - DNA, 20 bp, Artificial sequence
  Synthetic oligonucleotide
tattttgaaaatgagattca

SEQ ID NO: 933 - DNA, 20 bp, Artificial sequence
  Synthetic oligonucleotide
gtggcccgagtaaagataaa

SEQ ID NO: 934 - DNA, 20 bp, Artificial sequence
  Synthetic oligonucleotide
cctgtcaatcctcttatatg

SEQ ID NO: 935 - DNA, 20 bp, Artificial sequence
  Synthetic oligonucleotide
ggtgtttccattttcttgat

SEQ ID NO: 936 - DNA, 20 bp, Artificial sequence
  Synthetic oligonucleotide
acagggtcaaaagttcactt

SEQ ID NO: 937 - DNA, 20 bp, Artificial sequence
  Synthetic oligonucleotide
taggaaagctgagagaatcc

SEQ ID NO: 938 - DNA, 20 bp, Artificial sequence
  Synthetic oligonucleotide
agcatatgaaaaaatactca

SEQ ID NO: 939 - DNA, 20 bp, Artificial sequence
  Synthetic oligonucleotide
cttcagaaatcagcatctga

SEQ ID NO: 940 - DNA, 20 bp, Artificial sequence
  Synthetic oligonucleotide
ttacaagtgacagtgtttgt

SEQ ID NO: 941 - DNA, 20 bp, Artificial sequence
  Synthetic oligonucleotide
atcagaccctgaagaattta

SEQ ID NO: 942 - DNA, 20 bp, Artificial sequence
  Synthetic oligonucleotide
aggaacccatttcatccatt

SEQ ID NO: 943 - DNA, 20 bp, Artificial sequence
  Synthetic oligonucleotide
cacattggtaacttaaagtt

SEQ ID NO: 944 - DNA, 20 bp, Artificial sequence
  Synthetic oligonucleotide
tattatctgactcatttctg

SEQ ID NO: 945 - DNA, 20 bp, Artificial sequence
  Synthetic oligonucleotide
aaataagacaaagaaaattc

SEQ ID NO: 946 - DNA, 20 bp, Artificial sequence
  Synthetic oligonucleotide
ttttaaaaataaccaattca

SEQ ID NO: 947 - DNA, 20 bp, Artificial sequence
  Synthetic oligonucleotide
ctttgagggattgcctcagt

SEQ ID NO: 948 - DNA, 20 bp, Artificial sequence
  Synthetic oligonucleotide
acagtcctcatgaacagatt

SEQ ID NO: 949 - DNA, 20 bp, Artificial sequence
  Synthetic oligonucleotide
actatcattaataatattgt

SEQ ID NO: 950 - DNA, 20 bp, Artificial sequence
  Synthetic oligonucleotide
atctagatttgccttataag

SEQ ID NO: 951 - DNA, 20 bp, Artificial sequence
  Synthetic oligonucleotide
tggttgaggaagacagtctc

SEQ ID NO: 952 - DNA, 20 bp, Artificial sequence
  Synthetic oligonucleotide
tggctcataacttccttagc

SEQ ID NO: 953 - DNA, 20 bp, Artificial sequence
  Synthetic oligonucleotide
actaacttaggacttgggac

SEQ ID NO: 954 - DNA, 20 bp, Artificial sequence
  Synthetic oligonucleotide
cttatagcattactaagtgg

SEQ ID NO: 955 - DNA, 20 bp, Artificial sequence
  Synthetic oligonucleotide
tggtggcaggagagagggaa

SEQ ID NO: 956 - DNA, 20 bp, Artificial sequence
  Synthetic oligonucleotide
tttgccaggaaatcttgaaa

SEQ ID NO: 957 - DNA, 20 bp, Artificial sequence
  Synthetic oligonucleotide
ataacttttctctgaaattt

SEQ ID NO: 958 - DNA, 20 bp, Artificial sequence
  Synthetic oligonucleotide
ccatgggctagatcaggatt

SEQ ID NO: 959 - DNA, 20 bp, Artificial sequence
  Synthetic oligonucleotide
tgagcttagcagtcacttag

SEQ ID NO: 960 - DNA, 20 bp, Artificial sequence
  Synthetic oligonucleotide
aatgtctcagcaaacctggg

SEQ ID NO: 961 - DNA, 20 bp, Artificial sequence
  Synthetic oligonucleotide
ggatacagacatagctctaa

SEQ ID NO: 962 - DNA, 20 bp, Artificial sequence
  Synthetic oligonucleotide
acaacactgtttgtgagggt

SEQ ID NO: 963 - DNA, 20 bp, Artificial sequence
  Synthetic oligonucleotide
tctattttctaatagctgtt

SEQ ID NO: 964 - DNA, 20 bp, Artificial sequence
  Synthetic oligonucleotide
ggccccacctctgaccttca

SEQ ID NO: 965 - DNA, 20 bp, Artificial sequence
  Synthetic oligonucleotide
tggtaaagctagaaaaaaaa

SEQ ID NO: 966 - DNA, 20 bp, Artificial sequence
  Synthetic oligonucleotide
aagtggtaaatatgatcaca

SEQ ID NO: 967 - DNA, 20 bp, Artificial sequence
  Synthetic oligonucleotide
ggcttcaagtttaggatctg

SEQ ID NO: 968 - DNA, 20 bp, Artificial sequence
  Synthetic oligonucleotide
ttgttgacactctcttttgg

SEQ ID NO: 969 - DNA, 20 bp, Artificial sequence
  Synthetic oligonucleotide
gtatgtggctttaattcact

SEQ ID NO: 970 - DNA, 20 bp, Artificial sequence
  Synthetic oligonucleotide
aattagttgttttggcaaat

SEQ ID NO: 971 - DNA, 20 bp, Artificial sequence
  Synthetic oligonucleotide
ctgtgttcagttgcatcacg

SEQ ID NO: 972 - DNA, 20 bp, Artificial sequence
  Synthetic oligonucleotide
aatgtggaagtttcctaaca

SEQ ID NO: 973 - DNA, 20 bp, Artificial sequence
  Synthetic oligonucleotide
ttggtactcatgaggaggca

SEQ ID NO: 974 - DNA, 20 bp, Artificial sequence
  Synthetic oligonucleotide
tttctctgtgtttaaaattg

SEQ ID NO: 975 - DNA, 20 bp, Artificial sequence
  Synthetic oligonucleotide
gtaaagcacaatgaacaaaa

SEQ ID NO: 976 - DNA, 20 bp, Artificial sequence
  Synthetic oligonucleotide
atcacagatctttgctacaa

SEQ ID NO: 977 - DNA, 20 bp, Artificial sequence
  Synthetic oligonucleotide
tcctgcctttctgaaccaaa

SEQ ID NO: 978 - DNA, 20 bp, Artificial sequence
  Synthetic oligonucleotide
tggaaactctgcaactccaa

SEQ ID NO: 979 - DNA, 20 bp, Artificial sequence
  Synthetic oligonucleotide
acacagtagggaacaatttt

SEQ ID NO: 980 - DNA, 20 bp, Artificial sequence
  Synthetic oligonucleotide
agacagatggtgaaatgatg

SEQ ID NO: 981 - DNA, 20 bp, Artificial sequence
  Synthetic oligonucleotide
aaacagaaagagaagaaaac

SEQ ID NO: 982 - DNA, 20 bp, Artificial sequence
  Synthetic oligonucleotide
cttagataaatacttcaaga

SEQ ID NO: 983 - DNA, 20 bp, Artificial sequence
  Synthetic oligonucleotide
agccacttcttttacaacct

SEQ ID NO: 984 - DNA, 20 bp, Artificial sequence
  Synthetic oligonucleotide
tcacatctggatgtgaggct

SEQ ID NO: 985 - DNA, 20 bp, Artificial sequence
  Synthetic oligonucleotide
gactgaaacttaaaggtggg

SEQ ID NO: 986 - DNA, 20 bp, Artificial sequence
  Synthetic oligonucleotide
aaagatgtgcaatcatctaa

SEQ ID NO: 987 - DNA, 17 bp, Artificial sequence
  Synthetic oligonucleotide
gctggtgactctgcctg

SEQ ID NO: 988 - DNA, 17 bp, Artificial sequence
  Synthetic oligonucleotide
tgctggtgactctgcct

SEQ ID NO: 989 - DNA, 17 bp, Artificial sequence
  Synthetic oligonucleotide
ctgctggtgactctgcc

SEQ ID NO: 990 - DNA, 17 bp, Artificial sequence
  Synthetic oligonucleotide
agtagtcaatattattt

SEQ ID NO: 991 - DNA, 17 bp, Artificial sequence
  Synthetic oligonucleotide
cagtagtcaatattatt

SEQ ID NO: 992 - DNA, 17 bp, Artificial sequence
  Synthetic oligonucleotide
ccagtagtcaatattat

SEQ ID NO: 993 - DNA, 17 bp, Artificial sequence
  Synthetic oligonucleotide
cctttgggtgaatagca

SEQ ID NO: 994 - DNA, 17 bp, Artificial sequence
  Synthetic oligonucleotide
acctttgggtgaatagc

SEQ ID NO: 995 - DNA, 17 bp, Artificial sequence
  Synthetic oligonucleotide
cacctttgggtgaatag

SEQ ID NO: 996 - DNA, 17 bp, Artificial sequence
  Synthetic oligonucleotide
caacttgaggacaataa

SEQ ID NO: 997 - DNA, 17 bp, Artificial sequence
  Synthetic oligonucleotide
tcaacttgaggacaata

SEQ ID NO: 998 - DNA, 17 bp, Artificial sequence
  Synthetic oligonucleotide
ctcaacttgaggacaat

SEQ ID NO: 999 - DNA, 17 bp, Artificial sequence
  Synthetic oligonucleotide
caggaagaaaggaacct

SEQ ID NO: 1000 - DNA, 17 bp, Artificial sequence
  Synthetic oligonucleotide
ccaggaagaaaggaacc

SEQ ID NO: 1001 - DNA, 17 bp, Artificial sequence
  Synthetic oligonucleotide
accaggaagaaaggaac

SEQ ID NO: 1002 - DNA, 17 bp, Artificial sequence
  Synthetic oligonucleotide
tgcagtcatgtacacaa

SEQ ID NO: 1003 - DNA, 17 bp, Artificial sequence
  Synthetic oligonucleotide
ctgcagtcatgtacaca

SEQ ID NO: 1004 - DNA, 17 bp, Artificial sequence
  Synthetic oligonucleotide
tctgcagtcatgtacac

SEQ ID NO: 1005 - DNA, 17 bp, Artificial sequence
  Synthetic oligonucleotide
tggtttgtcaatccttt

SEQ ID NO: 1006 - DNA, 17 bp, Artificial sequence
  Synthetic oligonucleotide
ttggtttgtcaatcctt

SEQ ID NO: 1007 - DNA, 17 bp, Artificial sequence
  Synthetic oligonucleotide
cttggtttgtcaatcct

SEQ ID NO: 1008 - DNA, 17 bp, Artificial sequence
  Synthetic oligonucleotide
tacaatgcacaggacac

SEQ ID NO: 1009 - DNA, 17 bp, Artificial sequence
  Synthetic oligonucleotide
ctacaatgcacaggaca

SEQ ID NO: 1010 - DNA, 17 bp, Artificial sequence
  Synthetic oligonucleotide
gctacaatgcacaggac

SEQ ID NO: 1011 - DNA, 17 bp, Artificial sequence
  Synthetic oligonucleotide
gatatttattgctgtac

SEQ ID NO: 1012 - DNA, 17 bp, Artificial sequence
  Synthetic oligonucleotide
tgatatttattgctgta

SEQ ID NO: 1013 - DNA, 17 bp, Artificial sequence
  Synthetic oligonucleotide
ctgatatttattgctgt

SEQ ID NO: 1014 - DNA, 17 bp, Artificial sequence
  Synthetic oligonucleotide
agggtctttacaaagtt

SEQ ID NO: 1015 - DNA, 17 bp, Artificial sequence
  Synthetic oligonucleotide
cagggtctttacaaagt

SEQ ID NO: 1016 - DNA, 17 bp, Artificial sequence
  Synthetic oligonucleotide
ccagggtctttacaaag

SEQ ID NO: 1017 - DNA, 17 bp, Artificial sequence
  Synthetic oligonucleotide
ttctgcagtatcctagc

SEQ ID NO: 1018 - DNA, 17 bp, Artificial sequence
  Synthetic oligonucleotide
tttctgcagtatcctag

SEQ ID NO: 1019 - DNA, 17 bp, Artificial sequence
  Synthetic oligonucleotide
gtttctgcagtatccta

SEQ ID NO: 1020 - DNA, 17 bp, Artificial sequence
  Synthetic oligonucleotide
agtttctgcagtatcct

SEQ ID NO: 1021 - DNA, 17 bp, Artificial sequence
  Synthetic oligonucleotide
cagtttctgcagtatcc

SEQ ID NO: 1022 - DNA, 17 bp, Artificial sequence
  Synthetic oligonucleotide
caaattccagtcctagg

SEQ ID NO: 1023 - DNA, 17 bp, Artificial sequence
  Synthetic oligonucleotide
ccaaattccagtcctag

SEQ ID NO: 1024 - DNA, 17 bp, Artificial sequence
  Synthetic oligonucleotide
tccaaattccagtccta

SEQ ID NO: 1025 - DNA, 17 bp, Artificial sequence
  Synthetic oligonucleotide
aacccatttcatccatt

SEQ ID NO: 1026 - DNA, 17 bp, Artificial sequence
  Synthetic oligonucleotide
gaacccatttcatccat

SEQ ID NO: 1027 - DNA, 17 bp, Artificial sequence
  Synthetic oligonucleotide
ggaacccatttcatcca

SEQ ID NO: 1028 - DNA, 17 bp, Artificial sequence
  Synthetic oligonucleotide
gcttcatgtctttctag

SEQ ID NO: 1029 - DNA, 17 bp, Artificial sequence
  Synthetic oligonucleotide
tgcttcatgtctttcta

SEQ ID NO: 1030 - DNA, 17 bp, Artificial sequence
  Synthetic oligonucleotide
gtgcttcatgtctttct

SEQ ID NO: 1031 - DNA, 17 bp, Artificial sequence
  Synthetic oligonucleotide
tgagcttagcagtcact

SEQ ID NO: 1032 - DNA, 17 bp, Artificial sequence
  Synthetic oligonucleotide
catgagcttagcagtca

SEQ ID NO: 1033 - DNA, 17 bp, Artificial sequence
  Synthetic oligonucleotide
tacagacatagctctaa

SEQ ID NO: 1034 - DNA, 17 bp, Artificial sequence
  Synthetic oligonucleotide
atacagacatagctcta

SEQ ID NO: 1035 - DNA, 17 bp, Artificial sequence
  Synthetic oligonucleotide
gatacagacatagctct

SEQ ID NO: 1036 - DNA, 17 bp, Artificial sequence
  Synthetic oligonucleotide
tgtggctttaattcact

SEQ ID NO: 1037 - DNA, 17 bp, Artificial sequence
  Synthetic oligonucleotide
atgtggctttaattcac

SEQ ID NO: 1038 - DNA, 17 bp, Artificial sequence
  Synthetic oligonucleotide
tatgtggctttaattca

SEQ ID NO: 1039 - DNA, 17 bp, Artificial sequence
  Synthetic oligonucleotide
tgttcagttgcatcacg

SEQ ID NO: 1040 - DNA, 17 bp, Artificial sequence
  Synthetic oligonucleotide
gtgttcagttgcatcac

SEQ ID NO: 1041 - DNA, 17 bp, Artificial sequence
  Synthetic oligonucleotide
tgtgttcagttgcatca

SEQ ID NO: 1042 - DNA, 17 bp, Artificial sequence
  Synthetic oligonucleotide
catctggatgtgaggct

SEQ ID NO: 1043 - DNA, 17 bp, Artificial sequence
  Synthetic oligonucleotide
acatctggatgtgaggc

SEQ ID NO: 1044 - DNA, 17 bp, Artificial sequence
  Synthetic oligonucleotide
cacatctggatgtgagg

SEQ ID NO: 1045 - DNA, 17 bp, Artificial sequence
  Synthetic oligonucleotide
tcaggtaatttctggaa

SEQ ID NO: 1046 - DNA, 17 bp, Artificial sequence
  Synthetic oligonucleotide
ctcaggtaatttctgga

SEQ ID NO: 1047 - DNA, 17 bp, Artificial sequence
  Synthetic oligonucleotide
tctcaggtaatttctgg

SEQ ID NO: 1048 - DNA, 17 bp, Artificial sequence
  Synthetic oligonucleotide
ttgcttatttacctggg

SEQ ID NO: 1049 - DNA, 17 bp, Artificial sequence
  Synthetic oligonucleotide
tttgcttatttacctgg

SEQ ID NO: 1050 - DNA, 17 bp, Artificial sequence
  Synthetic oligonucleotide
ttttgcttatttacctg

SEQ ID NO: 1051 - DNA, 17 bp, Artificial sequence
  Synthetic oligonucleotide
atgatgttactactact

SEQ ID NO: 1052 - DNA, 17 bp, Artificial sequence
  Synthetic oligonucleotide
aatgatgttactactac

SEQ ID NO: 1053 - DNA, 17 bp, Artificial sequence
  Synthetic oligonucleotide
caatgatgttactacta

SEQ ID NO: 1054 - DNA, 17 bp, Artificial sequence
  Synthetic oligonucleotide
cccctagagcaatggtc

SEQ ID NO: 1055 - DNA, 17 bp, Artificial sequence
  Synthetic oligonucleotide
ccccctagagcaatggt

SEQ ID NO: 1056 - DNA, 17 bp, Artificial sequence
  Synthetic oligonucleotide
tccccctagagcaatgg

SEQ ID NO: 1057 - DNA, 17 bp, Artificial sequence
  Synthetic oligonucleotide
tcaattgcagatgctct

SEQ ID NO: 1058 - DNA, 17 bp, Artificial sequence
  Synthetic oligonucleotide
ctcaattgcagatgctc

SEQ ID NO: 1059 - DNA, 17 bp, Artificial sequence
  Synthetic oligonucleotide
gctcaattgcagatgct

SEQ ID NO: 1060 - DNA, 17 bp, Artificial sequence
  Synthetic oligonucleotide
agctcaattgcagatgc

SEQ ID NO: 1061 - DNA, 17 bp, Artificial sequence
  Synthetic oligonucleotide
gtatattcagtccaagg

SEQ ID NO: 1062 - DNA, 17 bp, Artificial sequence
  Synthetic oligonucleotide
agtatattcagtccaag

SEQ ID NO: 1063 - DNA, 17 bp, Artificial sequence
  Synthetic oligonucleotide
cagtatattcagtccaa

SEQ ID NO: 1064 - DNA, 20 bp, Artificial sequence
  Synthetic oligonucleotide
gagtatttcaggctggaaaa

SEQ ID NO: 1065 - DNA, 20 bp, Artificial sequence
  Synthetic oligonucleotide
gtaactcaggaatggaaaac

SEQ ID NO: 1066 - DNA, 20 bp, Artificial sequence
  Synthetic oligonucleotide
agtaactcaggaatggaaaa

SEQ ID NO: 1067 - DNA, 20 bp, Artificial sequence
  Synthetic oligonucleotide
aagtaactcaggaatggaaa

SEQ ID NO: 1068 - DNA, 20 bp, Artificial sequence
  Synthetic oligonucleotide
gagatttcaaataaatctca

SEQ ID NO: 1069 - DNA, 20 bp, Artificial sequence
  Synthetic oligonucleotide
tgagatttcaaataaatctc

SEQ ID NO: 1070 - DNA, 20 bp, Artificial sequence
  Synthetic oligonucleotide
gtgagatttcaaataaatct

SEQ ID NO: 1071 - DNA, 20 bp, Artificial sequence
  Synthetic oligonucleotide
tgtgagatttcaaataaatc

SEQ ID NO: 1072 - DNA, 20 bp, Artificial sequence
  Synthetic oligonucleotide
ttgtgagatttcaaataaat

SEQ ID NO: 1073 - DNA, 20 bp, Artificial sequence
  Synthetic oligonucleotide
tttgtgagatttcaaataaa

SEQ ID NO: 1074 - DNA, 20 bp, Artificial sequence
  Synthetic oligonucleotide
ctttgtgagatttcaaataa

SEQ ID NO: 1075 - DNA, 20 bp, Artificial sequence
  Synthetic oligonucleotide
actttgtgagatttcaaata

SEQ ID NO: 1076 - DNA, 20 bp, Artificial sequence
  Synthetic oligonucleotide
cactttgtgagatttcaaat

SEQ ID NO: 1077 - DNA, 20 bp, Artificial sequence
  Synthetic oligonucleotide
agtatttcaggctggaaaaa

SEQ ID NO: 1078 - DNA, 20 bp, Artificial sequence
  Synthetic oligonucleotide
tgagtatttcaggctggaaa

SEQ ID NO: 1079 - DNA, 20 bp, Artificial sequence
  Synthetic oligonucleotide
tctgagtatttcaggctgga

SEQ ID NO: 1080 - DNA, 20 bp, Artificial sequence
  Synthetic oligonucleotide
atctgagtatttcaggctgg

SEQ ID NO: 1081 - DNA, 20 bp, Artificial sequence
  Synthetic oligonucleotide
tatctgagtatttcaggctg

SEQ ID NO: 1082 - DNA, 20 bp, Artificial sequence
  Synthetic oligonucleotide
ttttgtgttatgccttgagg

SEQ ID NO: 1083 - DNA, 20 bp, Artificial sequence
  Synthetic oligonucleotide
tttttgtgttatgccttgag

SEQ ID NO: 1084 - DNA, 20 bp, Artificial sequence
  Synthetic oligonucleotide
atttttgtgttatgccttga

SEQ ID NO: 1085 - DNA, 20 bp, Artificial sequence
  Synthetic oligonucleotide
atatttttgtgttatgcctt

SEQ ID NO: 1086 - DNA, 20 bp, Artificial sequence
  Synthetic oligonucleotide
aatatttttgtgttatgcct

SEQ ID NO: 1087 - DNA, 20 bp, Artificial sequence
  Synthetic oligonucleotide
aaatatttttgtgttatgcc

SEQ ID NO: 1088 - DNA, 20 bp, Artificial sequence
  Synthetic oligonucleotide
ttgcttatttacctgggtaa

SEQ ID NO: 1089 - DNA, 20 bp, Artificial sequence
  Synthetic oligonucleotide
tttgcttatttacctgggta

SEQ ID NO: 1090 - DNA, 20 bp, Artificial sequence
  Synthetic oligonucleotide
ttttgcttatttacctgggt

SEQ ID NO: 1091 - DNA, 20 bp, Artificial sequence
  Synthetic oligonucleotide
ccttttgcttatttacctgg

SEQ ID NO: 1092 - DNA, 20 bp, Artificial sequence
  Synthetic oligonucleotide
gccttttgcttatttacctg

SEQ ID NO: 1093 - DNA, 20 bp, Artificial sequence
  Synthetic oligonucleotide
tgccttttgcttatttacct

SEQ ID NO: 1094 - DNA, 20 bp, Artificial sequence
  Synthetic oligonucleotide
atgatgttactactactcaa

SEQ ID NO: 1095 - DNA, 20 bp, Artificial sequence
  Synthetic oligonucleotide
aatgatgttactactactca

SEQ ID NO: 1096 - DNA, 20 bp, Artificial sequence
  Synthetic oligonucleotide
caatgatgttactactactc

SEQ ID NO: 1097 - DNA, 20 bp, Artificial sequence
  Synthetic oligonucleotide
tccaatgatgttactactac

SEQ ID NO: 1098 - DNA, 20 bp, Artificial sequence
  Synthetic oligonucleotide
ttccaatgatgttactacta

SEQ ID NO: 1099 - DNA, 20 bp, Artificial sequence
  Synthetic oligonucleotide
attccaatgatgttactact

SEQ ID NO: 1100 - DNA, 20 bp, Artificial sequence
  Synthetic oligonucleotide
cccctagagcaatggtctag

SEQ ID NO: 1101 - DNA, 20 bp, Artificial sequence
  Synthetic oligonucleotide
ccccctagagcaatggtcta

SEQ ID NO: 1102 - DNA, 20 bp, Artificial sequence
  Synthetic oligonucleotide
tccccctagagcaatggtct

SEQ ID NO: 1103 - DNA, 20 bp, Artificial sequence
  Synthetic oligonucleotide
tatccccctagagcaatggt

SEQ ID NO: 1104 - DNA, 20 bp, Artificial sequence
  Synthetic oligonucleotide
atatccccctagagcaatgg

SEQ ID NO: 1105 - DNA, 20 bp, Artificial sequence
  Synthetic oligonucleotide
aatatccccctagagcaatg

SEQ ID NO: 1106 - DNA, 20 bp, Artificial sequence
  Synthetic oligonucleotide
gctcacatttggaagacagt

SEQ ID NO: 1107 - DNA, 20 bp, Artificial sequence
  Synthetic oligonucleotide
ggctcacatttggaagacag

SEQ ID NO: 1108 - DNA, 20 bp, Artificial sequence
  Synthetic oligonucleotide
aggctcacatttggaagaca

SEQ ID NO: 1109 - DNA, 20 bp, Artificial sequence
  Synthetic oligonucleotide
agaggctcacatttggaaga

SEQ ID NO: 1110 - DNA, 20 bp, Artificial sequence
  Synthetic oligonucleotide
tagaggctcacatttggaag

SEQ ID NO: 1111 - DNA, 20 bp, Artificial sequence
  Synthetic oligonucleotide
ttagaggctcacatttggaa

SEQ ID NO: 1112 - DNA, 20 bp, Artificial sequence
  Synthetic oligonucleotide
ctcaattgcagatgctctga

SEQ ID NO: 1113 - DNA, 20 bp, Artificial sequence
  Synthetic oligonucleotide
gctcaattgcagatgctctg

SEQ ID NO: 1114 - DNA, 20 bp, Artificial sequence
  Synthetic oligonucleotide
agctcaattgcagatgctct

SEQ ID NO: 1115 - DNA, 20 bp, Artificial sequence
  Synthetic oligonucleotide
aaagctcaattgcagatgct

SEQ ID NO: 1116 - DNA, 20 bp, Artificial sequence
  Synthetic oligonucleotide
taaagctcaattgcagatgc

SEQ ID NO: 1117 - DNA, 20 bp, Artificial sequence
  Synthetic oligonucleotide
ataaagctcaattgcagatg

SEQ ID NO: 1118 - DNA, 20 bp, Artificial sequence
  Synthetic oligonucleotide
gtgagtccattaaacctctt

SEQ ID NO: 1119 - DNA, 20 bp, Artificial sequence
  Synthetic oligonucleotide
tgtgagtccattaaacctct

SEQ ID NO: 1120 - DNA, 20 bp, Artificial sequence
  Synthetic oligonucleotide
actgtgagtccattaaacct

SEQ ID NO: 1121 - DNA, 20 bp, Artificial sequence
  Synthetic oligonucleotide
aactgtgagtccattaaacc

SEQ ID NO: 1122 - DNA, 20 bp, Artificial sequence
  Synthetic oligonucleotide
gaactgtgagtccattaaac

SEQ ID NO: 1123 - DNA, 20 bp, Artificial sequence
  Synthetic oligonucleotide
atattgaaaggcccatcaaa

SEQ ID NO: 1124 - DNA, 20 bp, Artificial sequence
  Synthetic oligonucleotide
aatattgaaaggcccatcaa

SEQ ID NO: 1125 - DNA, 20 bp, Artificial sequence
  Synthetic oligonucleotide
aaatattgaaaggcccatca

SEQ ID NO: 1126 - DNA, 20 bp, Artificial sequence
  Synthetic oligonucleotide
gaaaatattgaaaggcccat

SEQ ID NO: 1127 - DNA, 20 bp, Artificial sequence
  Synthetic oligonucleotide
ggaaaatattgaaaggccca

SEQ ID NO: 1128 - DNA, 20 bp, Artificial sequence
  Synthetic oligonucleotide
aggaaaatattgaaaggccc

SEQ ID NO: 1129 - DNA, 20 bp, Artificial sequence
  Synthetic oligonucleotide
gtatattcagtccaaggatc

SEQ ID NO: 1130 - DNA, 20 bp, Artificial sequence
  Synthetic oligonucleotide
agtatattcagtccaaggat

SEQ ID NO: 1131 - DNA, 20 bp, Artificial sequence
  Synthetic oligonucleotide
cagtatattcagtccaagga

SEQ ID NO: 1132 - DNA, 20 bp, Artificial sequence
  Synthetic oligonucleotide
aacagtatattcagtccaag

SEQ ID NO: 1133 - DNA, 20 bp, Artificial sequence
  Synthetic oligonucleotide
aaacagtatattcagtccaa

SEQ ID NO: 1134 - DNA, 20 bp, Artificial sequence
  Synthetic oligonucleotide
aaaacagtatattcagtcca

SEQ ID NO: 1135 - DNA, 20 bp, Artificial sequence
  Synthetic oligonucleotide
tctattgttgccacctttat

SEQ ID NO: 1136 - DNA, 20 bp, Artificial sequence
  Synthetic oligonucleotide
ttctattgttgccaccttta

SEQ ID NO: 1137 - DNA, 20 bp, Artificial sequence
  Synthetic oligonucleotide
tttctattgttgccaccttt

SEQ ID NO: 1138 - DNA, 20 bp, Artificial sequence
  Synthetic oligonucleotide
agtttctattgttgccacct

SEQ ID NO: 1139 - DNA, 20 bp, Artificial sequence
  Synthetic oligonucleotide
cagtttctattgttgccacc

SEQ ID NO: 1140 - DNA, 20 bp, Artificial sequence
  Synthetic oligonucleotide
ccagtttctattgttgccac

SEQ ID NO: 1141 - DNA, 20 bp, Artificial sequence
  Synthetic oligonucleotide
gcagaactgattgcttactt

SEQ ID NO: 1142 - DNA, 20 bp, Artificial sequence
  Synthetic oligonucleotide
aggtcataagattttcattt

SEQ ID NO: 1143 - DNA, 20 bp, Artificial sequence
  Synthetic oligonucleotide
gcctctggccataaagaaat

SEQ ID NO: 1144 - DNA, 20 bp, Artificial sequence
  Synthetic oligonucleotide
aaagtttaagaggcacccca

SEQ ID NO: 1145 - DNA, 20 bp, Artificial sequence
  Synthetic oligonucleotide
gaataagcacaaaagtttaa

SEQ ID NO: 1146 - DNA, 20 bp, Artificial sequence
  Synthetic oligonucleotide
gaaccaaataaacctctctt

SEQ ID NO: 1147 - DNA, 20 bp, Artificial sequence
  Synthetic oligonucleotide
atgttgaaatttgatcccca

SEQ ID NO: 1148 - DNA, 20 bp, Artificial sequence
  Synthetic oligonucleotide
tgtgagagctcactcactat

SEQ ID NO: 1149 - DNA, 20 bp, Artificial sequence
  Synthetic oligonucleotide
cttgtgagagctcactcact

SEQ ID NO: 1150 - DNA, 20 bp, Artificial sequence
  Synthetic oligonucleotide
acatggtggcaggagagagg

SEQ ID NO: 1151 - DNA, 20 bp, Artificial sequence
  Synthetic oligonucleotide
ctagaaagaaactacctgag

SEQ ID NO: 1152 - DNA, 20 bp, Artificial sequence
  Synthetic oligonucleotide
aacttcagttgtaaaataat

SEQ ID NO: 1153 - DNA, 20 bp, Artificial sequence
  Synthetic oligonucleotide
gaaaaggattttgagatttc

SEQ ID NO: 1154 - DNA, 20 bp, Artificial sequence
  Synthetic oligonucleotide
cttagctgtcaaggcccttt

SEQ ID NO: 1155 - DNA, 20 bp, Artificial sequence
  Synthetic oligonucleotide
tgtgcttcatgtctttctag

SEQ ID NO: 1156 - DNA, 20 bp, Artificial sequence
  Synthetic oligonucleotide
cccttgaacatgctatcctt

SEQ ID NO: 1157 - DNA, 20 bp, Artificial sequence
  Synthetic oligonucleotide
cttgcagggatgcatctcag

SEQ ID NO: 1158 - DNA, 20 bp, Artificial sequence
  Synthetic oligonucleotide
tctcttgcacatctaatttc

SEQ ID NO: 1159 - DNA, 20 bp, Artificial sequence
  Synthetic oligonucleotide
cttccagcacaacccatcac

SEQ ID NO: 1160 - DNA, 20 bp, Artificial sequence
  Synthetic oligonucleotide
gtaactacattccctttatc

SEQ ID NO: 1161 - DNA, 20 bp, Artificial sequence
  Synthetic oligonucleotide
agtaactacattccctttat

SEQ ID NO: 1162 - DNA, 20 bp, Artificial sequence
  Synthetic oligonucleotide
cagatagcacagggctaaaa

SEQ ID NO: 1163 - DNA, 20 bp, Artificial sequence
  Synthetic oligonucleotide
agaatcaggaatgtttgcct

SEQ ID NO: 1164 - DNA, 20 bp, Artificial sequence
  Synthetic oligonucleotide
tgactcaatcatttagactt

SEQ ID NO: 1165 - DNA, 20 bp, Artificial sequence
  Synthetic oligonucleotide
tcaacagtcaatggacttgt

SEQ ID NO: 1166 - DNA, 20 bp, Artificial sequence
  Synthetic oligonucleotide
aatttctactgctatgatgc

SEQ ID NO: 1167 - DNA, 20 bp, Artificial sequence
  Synthetic oligonucleotide
atggttccaaatttctatct

SEQ ID NO: 1168 - DNA, 20 bp, Artificial sequence
  Synthetic oligonucleotide
ctgtatggctttaagtattc

SEQ ID NO: 1169 - DNA, 20 bp, Artificial sequence
  Synthetic oligonucleotide
aacttatgaactgttcacca

SEQ ID NO: 1170 - DNA, 20 bp, Artificial sequence
  Synthetic oligonucleotide
aataagcttgaagtctgaag

SEQ ID NO: 1171 - DNA, 20 bp, Artificial sequence
  Synthetic oligonucleotide
tagttatctaactgcccaat

SEQ ID NO: 1172 - DNA, 20 bp, Artificial sequence
  Synthetic oligonucleotide
ttctgcaaagcttcccagta

SEQ ID NO: 1173 - DNA, 20 bp, Artificial sequence
  Synthetic oligonucleotide
acaacttcaagcttcacata

SEQ ID NO: 1174 - DNA, 20 bp, Artificial sequence
  Synthetic oligonucleotide
gaatcaatgttctggcaaga

SEQ ID NO: 1175 - DNA, 20 bp, Artificial sequence
  Synthetic oligonucleotide
cagcctttcagctgtgaaag

SEQ ID NO: 1176 - DNA, 20 bp, Artificial sequence
  Synthetic oligonucleotide
aacaatgccaagaaatctat

SEQ ID NO: 1177 - DNA, 20 bp, Artificial sequence
  Synthetic oligonucleotide
cccacagtaacaatgccaag

SEQ ID NO: 1178 - DNA, 20 bp, Artificial sequence
  Synthetic oligonucleotide
ttttacctcccagtgaaact

SEQ ID NO: 1179 - DNA, 20 bp, Artificial sequence
  Synthetic oligonucleotide
taattgttgatccatgatgt

SEQ ID NO: 1180 - DNA, 20 bp, Artificial sequence
  Synthetic oligonucleotide
gttggagagacaagtttaac

SEQ ID NO: 1181 - DNA, 20 bp, Artificial sequence
  Synthetic oligonucleotide
agtcataaaattcaaattat

SEQ ID NO: 1182 - DNA, 20 bp, Artificial sequence
  Synthetic oligonucleotide
ggccttgggcacactttctc

SEQ ID NO: 1183 - DNA, 20 bp, Artificial sequence
  Synthetic oligonucleotide
aagtttttattgaagttaat

SEQ ID NO: 1184 - DNA, 20 bp, Artificial sequence
  Synthetic oligonucleotide
aagaaaaattaggaagctag

SEQ ID NO: 1185 - DNA, 20 bp, Artificial sequence
  Synthetic oligonucleotide
cagggagataagtttattca

SEQ ID NO: 1186 - DNA, 20 bp, Artificial sequence
  Synthetic oligonucleotide
atttaatacacattggaata

SEQ ID NO: 1187 - DNA, 20 bp, Artificial sequence
  Synthetic oligonucleotide
gtaggactatttatgattcc

SEQ ID NO: 1188 - DNA, 20 bp, Artificial sequence
  Synthetic oligonucleotide
cactctcttgggctgttaag

SEQ ID NO: 1189 - DNA, 20 bp, Artificial sequence
  Synthetic oligonucleotide
ttgtttgagttccaaaagaa

SEQ ID NO: 1190 - DNA, 20 bp, Artificial sequence
  Synthetic oligonucleotide
tttgccatgagacacacaat

SEQ ID NO: 1191 - DNA, 20 bp, Artificial sequence
  Synthetic oligonucleotide
caccaaacctcagagacatg

SEQ ID NO: 1192 - DNA, 20 bp, Artificial sequence
  Synthetic oligonucleotide
ccactgttaagtgatgcatg

SEQ ID NO: 1193 - DNA, 20 bp, Artificial sequence
  Synthetic oligonucleotide
ctctcaggtaatttctggaa

SEQ ID NO: 1194 - DNA, 20 bp, Artificial sequence
  Synthetic oligonucleotide
gctcctcacaatgacccttt

SEQ ID NO: 1195 - DNA, 20 bp, Artificial sequence
  Synthetic oligonucleotide
gggactggcactggtaattt

SEQ ID NO: 1196 - DNA, 20 bp, Artificial sequence
  Synthetic oligonucleotide
ctaaccattagttactgtat

SEQ ID NO: 1197 - DNA, 20 bp, Artificial sequence
  Synthetic oligonucleotide
ggattttaggttcttgctgt

SEQ ID NO: 1198 - DNA, 20 bp, Artificial sequence
  Synthetic oligonucleotide
tgaatcatatactgatatca

SEQ ID NO: 1199 - DNA, 20 bp, Artificial sequence
  Synthetic oligonucleotide
ttgaggtattaaattttaaa

SEQ ID NO: 1200 - DNA, 20 bp, Artificial sequence
  Synthetic oligonucleotide
agtttgtaatgtagtgattt

SEQ ID NO: 1201 - DNA, 20 bp, Artificial sequence
  Synthetic oligonucleotide
aaatatttgatagctcacat

SEQ ID NO: 1202 - DNA, 20 bp, Artificial sequence
  Synthetic oligonucleotide
agaaatatttgatagctcac

SEQ ID NO: 1203 - DNA, 20 bp, Artificial sequence
  Synthetic oligonucleotide
ccacatttcaaatgttctct

SEQ ID NO: 1204 - DNA, 20 bp, Artificial sequence
  Synthetic oligonucleotide
gcaggaagagtggcatggac

SEQ ID NO: 1205 - DNA, 20 bp, Artificial sequence
  Synthetic oligonucleotide
cacttatccaaatgcagaga

SEQ ID NO: 1206 - DNA, 20 bp, Artificial sequence
  Synthetic oligonucleotide
caaggtaatgggaggctagc

SEQ ID NO: 1207 - DNA, 20 bp, Artificial sequence
  Synthetic oligonucleotide
atagtcaaagctaaggatat

SEQ ID NO: 1208 - DNA, 20 bp, Artificial sequence
  Synthetic oligonucleotide
gtaatttcattcatgcttcc

SEQ ID NO: 1209 - DNA, 20 bp, Artificial sequence
  Synthetic oligonucleotide
gtccacattcagctgtgtgt

SEQ ID NO: 1210 - DNA, 20 bp, Artificial sequence
  Synthetic oligonucleotide
tcattcaggaaattctgcta

SEQ ID NO: 1211 - DNA, 20 bp, Artificial sequence
  Synthetic oligonucleotide
aacatgtctcattcaggaaa

SEQ ID NO: 1212 - DNA, 20 bp, Artificial sequence
  Synthetic oligonucleotide
taacatgtctcattcaggaa

SEQ ID NO: 1213 - DNA, 20 bp, Artificial sequence
  Synthetic oligonucleotide
agattcctcaaattcagtga

SEQ ID NO: 1214 - DNA, 20 bp, Artificial sequence
  Synthetic oligonucleotide
taagcggaaaaggagaaaag

SEQ ID NO: 1215 - DNA, 20 bp, Artificial sequence
  Synthetic oligonucleotide
aaagcaagagaattcctaaa

SEQ ID NO: 1216 - DNA, 20 bp, Artificial sequence
  Synthetic oligonucleotide
aatgaacctttaacttagta

SEQ ID NO: 1217 - DNA, 20 bp, Artificial sequence
  Synthetic oligonucleotide
aaagctttgtggataaagtt

SEQ ID NO: 1218 - DNA, 20 bp, Artificial sequence
  Synthetic oligonucleotide
gaaggaaaggttctgtggaa

SEQ ID NO: 1219 - DNA, 20 bp, Artificial sequence
  Synthetic oligonucleotide
ctgagtatttcaggctggaa

SEQ ID NO: 1220 - DNA, 20 bp, Artificial sequence
  Synthetic oligonucleotide
ttgaattatccctttaaaaa

SEQ ID NO: 1221 - DNA, 20 bp, Artificial sequence
  Synthetic oligonucleotide
tttagaatggtttggcatac

SEQ ID NO: 1222 - DNA, 20 bp, Artificial sequence
  Synthetic oligonucleotide
gatatgtccacattgattag

SEQ ID NO: 1223 - DNA, 20 bp, Artificial sequence
  Synthetic oligonucleotide
attatttaagcttctacttt

SEQ ID NO: 1224 - DNA, 20 bp, Artificial sequence
  Synthetic oligonucleotide
atacatggcaattaaaagat

SEQ ID NO: 1225 - DNA, 20 bp, Artificial sequence
  Synthetic oligonucleotide
tgagatagtgtgggaaatat

SEQ ID NO: 1226 - DNA, 20 bp, Artificial sequence
  Synthetic oligonucleotide
tatttttgtgttatgccttg

SEQ ID NO: 1227 - DNA, 20 bp, Artificial sequence
  Synthetic oligonucleotide
ttattaactagaatatgcct

SEQ ID NO: 1228 - DNA, 20 bp, Artificial sequence
  Synthetic oligonucleotide
gattattctatttttatttt

SEQ ID NO: 1229 - DNA, 20 bp, Artificial sequence
  Synthetic oligonucleotide
aggaagagtggcatggacat

SEQ ID NO: 1230 - DNA, 20 bp, Artificial sequence
  Synthetic oligonucleotide
cttttgcttatttacctggg

SEQ ID NO: 1231 - DNA, 20 bp, Artificial sequence
  Synthetic oligonucleotide
tttatattattaatatcatt

SEQ ID NO: 1232 - DNA, 20 bp, Artificial sequence
  Synthetic oligonucleotide
ggtacatggcttttaagtgg

SEQ ID NO: 1233 - DNA, 20 bp, Artificial sequence
  Synthetic oligonucleotide
aatattggtcaggtttaaga

SEQ ID NO: 1234 - DNA, 20 bp, Artificial sequence
  Synthetic oligonucleotide
atttcatctctttcttagtt

SEQ ID NO: 1235 - DNA, 20 bp, Artificial sequence
  Synthetic oligonucleotide
ccaatgatgttactactact

SEQ ID NO: 1236 - DNA, 20 bp, Artificial sequence
  Synthetic oligonucleotide
gttcccccaaccccttggaa

SEQ ID NO: 1237 - DNA, 20 bp, Artificial sequence
  Synthetic oligonucleotide
tataggaagtgagatgtatg

SEQ ID NO: 1238 - DNA, 20 bp, Artificial sequence
  Synthetic oligonucleotide
attattctagaagaagattt

SEQ ID NO: 1239 - DNA, 20 bp, Artificial sequence
  Synthetic oligonucleotide
atccccctagagcaatggtc

SEQ ID NO: 1240 - DNA, 20 bp, Artificial sequence
  Synthetic oligonucleotide
gaggctcacatttggaagac

SEQ ID NO: 1241 - DNA, 20 bp, Artificial sequence
  Synthetic oligonucleotide
tacacaaatccaaggcagag

SEQ ID NO: 1242 - DNA, 20 bp, Artificial sequence
  Synthetic oligonucleotide
aggaagagtgggagtgttac

SEQ ID NO: 1243 - DNA, 20 bp, Artificial sequence
  Synthetic oligonucleotide
gtccctgactaggcattttg

SEQ ID NO: 1244 - DNA, 20 bp, Artificial sequence
  Synthetic oligonucleotide
aagctcaattgcagatgctc

SEQ ID NO: 1245 - DNA, 20 bp, Artificial sequence
  Synthetic oligonucleotide
ctgtgagtccattaaacctc

SEQ ID NO: 1246 - DNA, 20 bp, Artificial sequence
  Synthetic oligonucleotide
tgaaatgtggctagtgtgac

SEQ ID NO: 1247 - DNA, 20 bp, Artificial sequence
  Synthetic oligonucleotide
aaaatattgaaaggcccatc

SEQ ID NO: 1248 - DNA, 20 bp, Artificial sequence
  Synthetic oligonucleotide
aatgtcaatagtgccctatt

SEQ ID NO: 1249 - DNA, 20 bp, Artificial sequence
  Synthetic oligonucleotide
acagtatattcagtccaagg

SEQ ID NO: 1250 - DNA, 20 bp, Artificial sequence
  Synthetic oligonucleotide
tgtctatttaagtttgttgc

SEQ ID NO: 1251 - DNA, 20 bp, Artificial sequence
  Synthetic oligonucleotide
ttcaagtactgtcatgaata

SEQ ID NO: 1252 - DNA, 20 bp, Artificial sequence
  Synthetic oligonucleotide
tttctttttcttaaactaag

SEQ ID NO: 1253 - DNA, 20 bp, Artificial sequence
  Synthetic oligonucleotide
gtttctattgttgccacctt

SEQ ID NO: 1254 - DNA, 20 bp, Artificial sequence
  Synthetic oligonucleotide
aaggccacatattatagtat

SEQ ID NO: 1255 - DNA, 20 bp, Artificial sequence
  Synthetic oligonucleotide
acctgaactattaatttctt

SEQ ID NO: 1256 - DNA, 20 bp, Artificial sequence
  Synthetic oligonucleotide
gaatgggctgagtagttgaa

SEQ ID NO: 1257 - DNA, 20 bp, Artificial sequence
  Synthetic oligonucleotide
tgatgaacattgctaatttg

SEQ ID NO: 1258 - DNA, 20 bp, Artificial sequence
  Synthetic oligonucleotide
atcttgcctcgatgaaagtt

SEQ ID NO: 1259 - DNA, 20 bp, Artificial sequence
  Synthetic oligonucleotide
ttaagtggcacagccatgat

SEQ ID NO: 1260 - DNA, 20 bp, Artificial sequence
  Synthetic oligonucleotide
aatgagttaagttggaacac

SEQ ID NO: 1261 - DNA, 20 bp, Artificial sequence
  Synthetic oligonucleotide
tccttagtagaatgcctgga

SEQ ID NO: 1262 - DNA, 20 bp, Artificial sequence
  Synthetic oligonucleotide
tatgtagaaaaataagctgg

SEQ ID NO: 1263 - DNA, 20 bp, Artificial sequence
  Synthetic oligonucleotide
gccgaggcaggcacctgagt

SEQ ID NO: 1264 - DNA, 20 bp, Artificial sequence
  Synthetic oligonucleotide
tggtacctatattgagaggt

SEQ ID NO: 1265 - DNA, 20 bp, Artificial sequence
  Synthetic oligonucleotide
ttaaggaaaaatatagtata

SEQ ID NO: 1266 - DNA, 20 bp, Artificial sequence
  Synthetic oligonucleotide
ttatttatgtgtcagggatg

SEQ ID NO: 1267 - DNA, 20 bp, Artificial sequence
  Synthetic oligonucleotide
caaaagttaagtgctttagg

SEQ ID NO: 1268 - DNA, 20 bp, Artificial sequence
  Synthetic oligonucleotide
ttcatagatgtctaaggaat

SEQ ID NO: 1269 - DNA, 20 bp, Artificial sequence
  Synthetic oligonucleotide
acctgtgatttacctatttc

SEQ ID NO: 1270 - DNA, 20 bp, Artificial sequence
  Synthetic oligonucleotide
tgcctagaaaaccacataaa

SEQ ID NO: 1271 - DNA, 20 bp, Artificial sequence
  Synthetic oligonucleotide
aaacatcctcaaaggtacct

SEQ ID NO: 1272 - DNA, 20 bp, Artificial sequence
  Synthetic oligonucleotide
cttccctgagacacacacat

SEQ ID NO: 1273 - DNA, 20 bp, Artificial sequence
  Synthetic oligonucleotide
cttcttcaatcttctcatac

SEQ ID NO: 1274 - DNA, 20 bp, Artificial sequence
  Synthetic oligonucleotide
taccattttccatttagttt

SEQ ID NO: 1275 - DNA, 20 bp, Artificial sequence
  Synthetic oligonucleotide
attggcatctttttcagtgg

SEQ ID NO: 1276 - DNA, 20 bp, Artificial sequence
  Synthetic oligonucleotide
tcaagctcacggttggagac

SEQ ID NO: 1277 - DNA, 20 bp, Artificial sequence
  Synthetic oligonucleotide
aaatgaaatcagtatgttga

SEQ ID NO: 1278 - DNA, 20 bp, Artificial sequence
  Synthetic oligonucleotide
tgatttatcacaaaggtgct

SEQ ID NO: 1279 - DNA, 20 bp, Artificial sequence
  Synthetic oligonucleotide
aaaacagtagaaaagattaa

SEQ ID NO: 1280 - DNA, 20 bp, Artificial sequence
  Synthetic oligonucleotide
ctacatcacagcagtcagaa

SEQ ID NO: 1281 - DNA, 20 bp, Artificial sequence
  Synthetic oligonucleotide
aaaagatgtaagtgtgacat

SEQ ID NO: 1282 - DNA, 20 bp, Artificial sequence
  Synthetic oligonucleotide
ttacaagaactgctaaaggg

SEQ ID NO: 1283 - DNA, 20 bp, Artificial sequence
  Synthetic oligonucleotide
ataaagaaaaagttaactga

SEQ ID NO: 1284 - DNA, 20 bp, Artificial sequence
  Synthetic oligonucleotide
agataatatacttcttctat

SEQ ID NO: 1285 - DNA, 20 bp, Artificial sequence
  Synthetic oligonucleotide
ccttcttcacatgtaaattg

SEQ ID NO: 1286 - DNA, 20 bp, Artificial sequence
  Synthetic oligonucleotide
tttctatgtagcttgtggtt

SEQ ID NO: 1287 - DNA, 20 bp, Artificial sequence
  Synthetic oligonucleotide
aggcagagtttttattgata

SEQ ID NO: 1288 - DNA, 20 bp, Artificial sequence
  Synthetic oligonucleotide
atagtcaccagcctaagcct

SEQ ID NO: 1289 - DNA, 20 bp, Artificial sequence
  Synthetic oligonucleotide
agacttttagcatgcttgac

SEQ ID NO: 1290 - DNA, 20 bp, Artificial sequence
  Synthetic oligonucleotide
tttacagccctacagttcta

SEQ ID NO: 1291 - DNA, 20 bp, Artificial sequence
  Synthetic oligonucleotide
ccagagaacctgactccaaa

SEQ ID NO: 1292 - DNA, 20 bp, Artificial sequence
  Synthetic oligonucleotide
cagaagaaaatattagacag

SEQ ID NO: 1293 - DNA, 20 bp, Artificial sequence
  Synthetic oligonucleotide
tattatacttctaaattccc

SEQ ID NO: 1294 - DNA, 20 bp, Artificial sequence
  Synthetic oligonucleotide
taaaagcaagaaaaaggaac

SEQ ID NO: 1295 - DNA, 20 bp, Artificial sequence
  Synthetic oligonucleotide
cctaatttatatgaacaaac

SEQ ID NO: 1296 - DNA, 20 bp, Artificial sequence
  Synthetic oligonucleotide
tgcaatgccttagcctaaaa

SEQ ID NO: 1297 - DNA, 20 bp, Artificial sequence
  Synthetic oligonucleotide
caccaccattattacactac

SEQ ID NO: 1298 - DNA, 20 bp, Artificial sequence
  Synthetic oligonucleotide
aaataaatcagattattata

SEQ ID NO: 1299 - DNA, 20 bp, Artificial sequence
  Synthetic oligonucleotide
cttagatctgtgctgtccaa

SEQ ID NO: 1300 - DNA, 20 bp, Artificial sequence
  Synthetic oligonucleotide
gttagtgttagattctttga

SEQ ID NO: 1301 - DNA, 20 bp, Artificial sequence
  Synthetic oligonucleotide
catgctcacggctgtgttac

SEQ ID NO: 1302 - DNA, 20 bp, Artificial sequence
  Synthetic oligonucleotide
cccatcaaatactgagttct

SEQ ID NO: 1303 - DNA, 20 bp, Artificial sequence
  Synthetic oligonucleotide
gaaagtagtgattaatgaga

SEQ ID NO: 1304 - DNA, 20 bp, Artificial sequence
  Synthetic oligonucleotide
attaatcaacaagtggcatt

SEQ ID NO: 1305 - DNA, 20 bp, Artificial sequence
  Synthetic oligonucleotide
tttaattttagggtttagag

SEQ ID NO: 1306 - DNA, 20 bp, Artificial sequence
  Synthetic oligonucleotide
cttgctaccactagagcctt

SEQ ID NO: 1307 - DNA, 20 bp, Artificial sequence
  Synthetic oligonucleotide
accactgacttatatcattt

SEQ ID NO: 1308 - DNA, 20 bp, Artificial sequence
  Synthetic oligonucleotide
ttccccattgctaattttgt

SEQ ID NO: 1309 - DNA, 20 bp, Artificial sequence
  Synthetic oligonucleotide
tcctgaaacttagtagctgg

SEQ ID NO: 1310 - DNA, 20 bp, Artificial sequence
  Synthetic oligonucleotide
tgtcttaaaaaggaataaaa

SEQ ID NO: 1311 - DNA, 20 bp, Artificial sequence
  Synthetic oligonucleotide
cctataataaagtattgtct

SEQ ID NO: 1312 - DNA, 20 bp, Artificial sequence
  Synthetic oligonucleotide
atgtaaaatggtatagctac

SEQ ID NO: 1313 - DNA, 20 bp, Artificial sequence
  Synthetic oligonucleotide
aaccctcacacacttctgtt

SEQ ID NO: 1314 - DNA, 20 bp, Artificial sequence
  Synthetic oligonucleotide
attctgcataagcagtgttt

SEQ ID NO: 1315 - DNA, 20 bp, Artificial sequence
  Synthetic oligonucleotide
ttactaccctgaagaagaac

SEQ ID NO: 1316 - DNA, 20 bp, Artificial sequence
  Synthetic oligonucleotide
aagacctataacttactacc

SEQ ID NO: 1317 - DNA, 20 bp, Artificial sequence
  Synthetic oligonucleotide
tttcacaagatttacttggt

SEQ ID NO: 1318 - DNA, 20 bp, Artificial sequence
  Synthetic oligonucleotide
cagttgtgattgtcaaccta

SEQ ID NO: 1319 - DNA, 20 bp, Artificial sequence
  Synthetic oligonucleotide
aatcttgcctcgatgaaagt

SEQ ID NO: 1320 - DNA, 20 bp, Artificial sequence
  Synthetic oligonucleotide
tggcctaaatgtatcagtta

SEQ ID NO: 1321 - DNA, 20 bp, Artificial sequence
  Synthetic oligonucleotide
aggctttgggtaaaatcttt

SEQ ID NO: 1322 - DNA, 20 bp, Artificial sequence
  Synthetic oligonucleotide
tatgatttttaaagattaaa

SEQ ID NO: 1323 - DNA, 20 bp, Artificial sequence
  Synthetic oligonucleotide
gtacagtgaaaaagatgtgt

SEQ ID NO: 1324 - DNA, 20 bp, Artificial sequence
  Synthetic oligonucleotide
gacaggtatgaagcaaaaca

SEQ ID NO: 1325 - DNA, 20 bp, Artificial sequence
  Synthetic oligonucleotide
tgagctgagggtctttgccg

SEQ ID NO: 1326 - DNA, 20 bp, Artificial sequence
  Synthetic oligonucleotide
aggctgagttgtacacaaac

SEQ ID NO: 1327 - DNA, 20 bp, Artificial sequence
  Synthetic oligonucleotide
atgaggaggctgagttgtac

SEQ ID NO: 1328 - DNA, 20 bp, Artificial sequence
  Synthetic oligonucleotide
tcataaagtgggcccagctt

SEQ ID NO: 1329 - DNA, 20 bp, Artificial sequence
  Synthetic oligonucleotide
actcctaatccctcagtttt

SEQ ID NO: 1330 - DNA, 20 bp, Artificial sequence
  Synthetic oligonucleotide
tttacatgcaaggagctgag

SEQ ID NO: 1331 - DNA, 20 bp, Artificial sequence
  Synthetic oligonucleotide
taatgccctttctccctact

SEQ ID NO: 1332 - DNA, 20 bp, Artificial sequence
  Synthetic oligonucleotide
cctgtttagattatcccaaa

SEQ ID NO: 1333 - DNA, 20 bp, Artificial sequence
  Synthetic oligonucleotide
catgattcacagaatttctc

SEQ ID NO: 1334 - DNA, 20 bp, Artificial sequence
  Synthetic oligonucleotide
agttagaaaactcaaagtat

SEQ ID NO: 1335 - DNA, 20 bp, Artificial sequence
  Synthetic oligonucleotide
tcaaatgtacttagcataag

SEQ ID NO: 1336 - DNA, 20 bp, Artificial sequence
  Synthetic oligonucleotide
atatcaaatgtacttagcat

SEQ ID NO: 1337 - DNA, 20 bp, Artificial sequence
  Synthetic oligonucleotide
aaagttcagaagagggaatg

SEQ ID NO: 1338 - DNA, 20 bp, Artificial sequence
  Synthetic oligonucleotide
aattcccatctgagtagttt

SEQ ID NO: 1339 - DNA, 20 bp, Artificial sequence
  Synthetic oligonucleotide
gtcccctaatttcaggctaa

SEQ ID NO: 1340 - DNA, 20 bp, Artificial sequence
  Synthetic oligonucleotide
ctatgtcaaatgaaacaaaa

SEQ ID NO: 1341 - DNA, 20 bp, Artificial sequence
  Synthetic oligonucleotide
tgattatgctttgtgataaa

SEQ ID NO: 1342 - DNA, 20 bp, Artificial sequence
  Synthetic oligonucleotide
tccagctgactaggagggct

SEQ ID NO: 1343 - DNA, 20 bp, Artificial sequence
  Synthetic oligonucleotide
cataccagtctcctcgctca

SEQ ID NO: 1344 - DNA, 20 bp, Artificial sequence
  Synthetic oligonucleotide
atataacagaatccaaccat

SEQ ID NO: 1345 - DNA, 20 bp, Artificial sequence
  Synthetic oligonucleotide
tgcaaaatggccaaactaca

SEQ ID NO: 1346 - DNA, 20 bp, Artificial sequence
  Synthetic oligonucleotide
tcttcctagccacatgtgat

SEQ ID NO: 1347 - DNA, 20 bp, Artificial sequence
  Synthetic oligonucleotide
taccatgctctctaattgcc

SEQ ID NO: 1348 - DNA, 20 bp, Artificial sequence
  Synthetic oligonucleotide
agtgatctgtgccaggctgc

SEQ ID NO: 1349 - DNA, 20 bp, Artificial sequence
  Synthetic oligonucleotide
aagttacagaacagatatct

SEQ ID NO: 1350 - DNA, 20 bp, Artificial sequence
  Synthetic oligonucleotide
gtattgtgaaaatagtactg

SEQ ID NO: 1351 - DNA, 20 bp, Artificial sequence
  Synthetic oligonucleotide
aaacactatcaagctcacgg

SEQ ID NO: 1352 - DNA, 20 bp, Artificial sequence
  Synthetic oligonucleotide
ttcaagaaaagtcttcaaat

SEQ ID NO: 1353 - DNA, 20 bp, Artificial sequence
  Synthetic oligonucleotide
ggatcatttccccatgcatg

SEQ ID NO: 1354 - DNA, 20 bp, Artificial sequence
  Synthetic oligonucleotide
atattatattaagaaaaatg

SEQ ID NO: 1355 - DNA, 20 bp, Artificial sequence
  Synthetic oligonucleotide
ctcccatgttcattacttat

SEQ ID NO: 1356 - DNA, 20 bp, Artificial sequence
  Synthetic oligonucleotide
catgacattggtttgggcaa

SEQ ID NO: 1357 - DNA, 20 bp, Artificial sequence
  Synthetic oligonucleotide
aatgttgttgggaaaattgg

SEQ ID NO: 1358 - DNA, 20 bp, Artificial sequence
  Synthetic oligonucleotide
agctgcaggatacaaagtca

SEQ ID NO: 1359 - DNA, 20 bp, Artificial sequence
  Synthetic oligonucleotide
atatcctttcatgataaaaa

SEQ ID NO: 1360 - DNA, 20 bp, Artificial sequence
  Synthetic oligonucleotide
atgggctaatatctctgata

SEQ ID NO: 1361 - DNA, 20 bp, Artificial sequence
  Synthetic oligonucleotide
acattactaataattagaga

SEQ ID NO: 1362 - DNA, 20 bp, Artificial sequence
  Synthetic oligonucleotide
ataaaaacatatgaaagtat

SEQ ID NO: 1363 - DNA, 20 bp, Artificial sequence
  Synthetic oligonucleotide
ttctgaattaaatctattag

SEQ ID NO: 1364 - DNA, 20 bp, Artificial sequence
  Synthetic oligonucleotide
ttacatttttgcaaatttat

SEQ ID NO: 1365 - DNA, 20 bp, Artificial sequence
  Synthetic oligonucleotide
tgaacagttgattaacaaag

SEQ ID NO: 1366 - DNA, 20 bp, Artificial sequence
  Synthetic oligonucleotide
aagttattggtttactagat

SEQ ID NO: 1367 - DNA, 20 bp, Artificial sequence
  Synthetic oligonucleotide
ttggaaaaggtcctagaaaa

SEQ ID NO: 1368 - DNA, 20 bp, Artificial sequence
  Synthetic oligonucleotide
catgacagaaacttcttaga

SEQ ID NO: 1369 - DNA, 20 bp, Artificial sequence
  Synthetic oligonucleotide
ccatacttgctgacaaatat

SEQ ID NO: 1370 - DNA, 16 bp, Artificial sequence
  Synthetic oligonucleotide
ttggtttgtcaatcct

SEQ ID NO: 1371 - DNA, 16 bp, Artificial sequence
  Synthetic oligonucleotide
ccgagcttcgcctctg

SEQ ID NO: 1372 - DNA, 16 bp, Artificial sequence
  Synthetic oligonucleotide
cctccgagcttcgcct

SEQ ID NO: 1373 - DNA, 16 bp, Artificial sequence
  Synthetic oligonucleotide
ggacctccgagcttcg

SEQ ID NO: 1374 - DNA, 16 bp, Artificial sequence
  Synthetic oligonucleotide
cctgtaggacctccga

SEQ ID NO: 1375 - DNA, 16 bp, Artificial sequence
  Synthetic oligonucleotide
ccagtgccaaggtcaa

SEQ ID NO: 1376 - DNA, 16 bp, Artificial sequence
  Synthetic oligonucleotide
cacttgatcctgccag

SEQ ID NO: 1377 - DNA, 16 bp, Artificial sequence
  Synthetic oligonucleotide
cacttccagaaaaagc

SEQ ID NO: 1378 - DNA, 16 bp, Artificial sequence
  Synthetic oligonucleotide
gtctctcgctcaggtg

SEQ ID NO: 1379 - DNA, 16 bp, Artificial sequence
  Synthetic oligonucleotide
aaagtctctcgctcag

SEQ ID NO: 1380 - DNA, 16 bp, Artificial sequence
  Synthetic oligonucleotide
atgaaaaagtctctcg

SEQ ID NO: 1381 - DNA, 16 bp, Artificial sequence
  Synthetic oligonucleotide
tccttctggtatagaa

SEQ ID NO: 1382 - DNA, 16 bp, Artificial sequence
  Synthetic oligonucleotide
caataaggtatccaga

SEQ ID NO: 1383 - DNA, 16 bp, Artificial sequence
  Synthetic oligonucleotide
cttgatacaataaggt

SEQ ID NO: 1384 - DNA, 16 bp, Artificial sequence
  Synthetic oligonucleotide
ctagttagcttgatac

SEQ ID NO: 1385 - DNA, 16 bp, Artificial sequence
  Synthetic oligonucleotide
gatctggttgcactat

SEQ ID NO: 1386 - DNA, 16 bp, Artificial sequence
  Synthetic oligonucleotide
ggcaatgggtggatct

SEQ ID NO: 1387 - DNA, 16 bp, Artificial sequence
  Synthetic oligonucleotide
ccagttgagggcaatg

SEQ ID NO: 1388 - DNA, 16 bp, Artificial sequence
  Synthetic oligonucleotide
taaagtccagttgagg

SEQ ID NO: 1389 - DNA, 16 bp, Artificial sequence
  Synthetic oligonucleotide
tacatagagcacctca

SEQ ID NO: 1390 - DNA, 16 bp, Artificial sequence
  Synthetic oligonucleotide
tgttacatagagcacc

SEQ ID NO: 1391 - DNA, 16 bp, Artificial sequence
  Synthetic oligonucleotide
aagtgttacatagagc

SEQ ID NO: 1392 - DNA, 16 bp, Artificial sequence
  Synthetic oligonucleotide
cttcacatgtaaattg

SEQ ID NO: 1393 - DNA, 16 bp, Artificial sequence
  Synthetic oligonucleotide
gagccatggaaagtag

SEQ ID NO: 1394 - DNA, 16 bp, Artificial sequence
  Synthetic oligonucleotide
ccttccttgaggagat

SEQ ID NO: 1395 - DNA, 16 bp, Artificial sequence
  Synthetic oligonucleotide
cttcacccctaggtta

SEQ ID NO: 1396 - DNA, 16 bp, Artificial sequence
  Synthetic oligonucleotide
ccatccttcaccccta

SEQ ID NO: 1397 - DNA, 16 bp, Artificial sequence
  Synthetic oligonucleotide
gtcgccatccttcacc

SEQ ID NO: 1398 - DNA, 16 bp, Artificial sequence
  Synthetic oligonucleotide
ccagagtcgccatcct

SEQ ID NO: 1399 - DNA, 16 bp, Artificial sequence
  Synthetic oligonucleotide
gtggctgagcaacctc

SEQ ID NO: 1400 - DNA, 16 bp, Artificial sequence
  Synthetic oligonucleotide
cccttttaacctctgt

SEQ ID NO: 1401 - DNA, 16 bp, Artificial sequence
  Synthetic oligonucleotide
catcatgataaggtga

SEQ ID NO: 1402 - DNA, 16 bp, Artificial sequence
  Synthetic oligonucleotide
tggataacactgggct

SEQ ID NO: 1403 - DNA, 16 bp, Artificial sequence
  Synthetic oligonucleotide
tctgcttggataacac

SEQ ID NO: 1404 - DNA, 16 bp, Artificial sequence
  Synthetic oligonucleotide
gaatatgggcagcttg

SEQ ID NO: 1405 - DNA, 16 bp, Artificial sequence
  Synthetic oligonucleotide
agctgaatatgggcag

SEQ ID NO: 1406 - DNA, 16 bp, Artificial sequence
  Synthetic oligonucleotide
ttgcttagctgaatat

SEQ ID NO: 1407 - DNA, 16 bp, Artificial sequence
  Synthetic oligonucleotide
tggattgcttagctga

SEQ ID NO: 1408 - DNA, 16 bp, Artificial sequence
  Synthetic oligonucleotide
acttggattgcttagc

SEQ ID NO: 1409 - DNA, 16 bp, Artificial sequence
  Synthetic oligonucleotide
agtgaacttggattgc

SEQ ID NO: 1410 - DNA, 16 bp, Artificial sequence
  Synthetic oligonucleotide
ggcataaaagtcgatg

SEQ ID NO: 1411 - DNA, 16 bp, Artificial sequence
  Synthetic oligonucleotide
ctgggcataaaagtcg

SEQ ID NO: 1412 - DNA, 16 bp, Artificial sequence
  Synthetic oligonucleotide
ggaaaggaccacacta

SEQ ID NO: 1413 - DNA, 16 bp, Artificial sequence
  Synthetic oligonucleotide
gagtgagaccatttcc

SEQ ID NO: 1414 - DNA, 16 bp, Artificial sequence
  Synthetic oligonucleotide
gatgtgaggagccaca

SEQ ID NO: 1415 - DNA, 16 bp, Artificial sequence
  Synthetic oligonucleotide
cttgatgtgaggagcc

SEQ ID NO: 1416 - DNA, 16 bp, Artificial sequence
  Synthetic oligonucleotide
tcaaccttgatgtgag

SEQ ID NO: 1417 - DNA, 16 bp, Artificial sequence
  Synthetic oligonucleotide
tgattcaaccttgatg

SEQ ID NO: 1418 - DNA, 16 bp, Artificial sequence
  Synthetic oligonucleotide
gtgtgattcaaccttg

SEQ ID NO: 1419 - DNA, 16 bp, Artificial sequence
  Synthetic oligonucleotide
tatgtgtgattcaacc

SEQ ID NO: 1420 - DNA, 16 bp, Artificial sequence
  Synthetic oligonucleotide
ggcatctcagaacctg

SEQ ID NO: 1421 - DNA, 16 bp, Artificial sequence
  Synthetic oligonucleotide
ggtatagtctgggaca

SEQ ID NO: 1422 - DNA, 16 bp, Artificial sequence
  Synthetic oligonucleotide
tggaggtatagtctgg

SEQ ID NO: 1423 - DNA, 16 bp, Artificial sequence
  Synthetic oligonucleotide
gaatggaggtatagtc

SEQ ID NO: 1424 - DNA, 16 bp, Artificial sequence
  Synthetic oligonucleotide
tatgaatggaggtata

SEQ ID NO: 1425 - DNA, 16 bp, Artificial sequence
  Synthetic oligonucleotide
ctatatgaatggaggt

SEQ ID NO: 1426 - DNA, 16 bp, Artificial sequence
  Synthetic oligonucleotide
gtactatatgaatgga

SEQ ID NO: 1427 - DNA, 16 bp, Artificial sequence
  Synthetic oligonucleotide
gggactgtactatatg

SEQ ID NO: 1428 - DNA, 16 bp, Artificial sequence
  Synthetic oligonucleotide
ttacattgcacaatag

SEQ ID NO: 1429 - DNA, 16 bp, Artificial sequence
  Synthetic oligonucleotide
tagccatgcttgaagt

SEQ ID NO: 1430 - DNA, 16 bp, Artificial sequence
  Synthetic oligonucleotide
tgtgtagtgtaatata

SEQ ID NO: 1431 - DNA, 16 bp, Artificial sequence
  Synthetic oligonucleotide
acagtgtgtagtgtaa

SEQ ID NO: 1432 - DNA, 16 bp, Artificial sequence
  Synthetic oligonucleotide
gcagtacacagtgtgt

SEQ ID NO: 1433 - DNA, 16 bp, Artificial sequence
  Synthetic oligonucleotide
actgcagtacacagtg

SEQ ID NO: 1434 - DNA, 16 bp, Artificial sequence
  Synthetic oligonucleotide
ttagactgtagttgct

SEQ ID NO: 1435 - DNA, 16 bp, Artificial sequence
  Synthetic oligonucleotide
ccagctttagactgta

SEQ ID NO: 1436 - DNA, 16 bp, Artificial sequence
  Synthetic oligonucleotide
taaaccagctttagac

SEQ ID NO: 1437 - DNA, 16 bp, Artificial sequence
  Synthetic oligonucleotide
aacattaaaccagctt

SEQ ID NO: 1438 - DNA, 16 bp, Artificial sequence
  Synthetic oligonucleotide
actacaatcattttag

SEQ ID NO: 1439 - DNA, 16 bp, Artificial sequence
  Synthetic oligonucleotide
gattactacaatcatt

SEQ ID NO: 1440 - DNA, 16 bp, Artificial sequence
  Synthetic oligonucleotide
aatgcagattactaca

SEQ ID NO: 1441 - DNA, 16 bp, Artificial sequence
  Synthetic oligonucleotide
tccaataatgcagatt

SEQ ID NO: 1442 - DNA, 16 bp, Artificial sequence
  Synthetic oligonucleotide
gttgatctgtgcaaac

SEQ ID NO: 1443 - DNA, 16 bp, Artificial sequence
  Synthetic oligonucleotide
tctacttctcttagca

SEQ ID NO: 1444 - DNA, 16 bp, Artificial sequence
  Synthetic oligonucleotide
gcttcttgtaccttat

SEQ ID NO: 1445 - DNA, 16 bp, Artificial sequence
  Synthetic oligonucleotide
gatttgcttcaactta

SEQ ID NO: 1446 - DNA, 16 bp, Artificial sequence
  Synthetic oligonucleotide
ggttataggctgtgaa

SEQ ID NO: 1447 - DNA, 16 bp, Artificial sequence
  Synthetic oligonucleotide
tctggttataggctgt

SEQ ID NO: 1448 - DNA, 16 bp, Artificial sequence
  Synthetic oligonucleotide
gtgtctggttataggc

SEQ ID NO: 1449 - DNA, 16 bp, Artificial sequence
  Synthetic oligonucleotide
agtatgtgtctggtta

SEQ ID NO: 1450 - DNA, 16 bp, Artificial sequence
  Synthetic oligonucleotide
gggactgaaaaccttg

SEQ ID NO: 1451 - DNA, 16 bp, Artificial sequence
  Synthetic oligonucleotide
agtattcttcactgag

SEQ ID NO: 1452 - DNA, 16 bp, Artificial sequence
  Synthetic oligonucleotide
gcgataaatgggaaat

SEQ ID NO: 1453 - DNA, 16 bp, Artificial sequence
  Synthetic oligonucleotide
gtctgcgataaatggg

SEQ ID NO: 1454 - DNA, 16 bp, Artificial sequence
  Synthetic oligonucleotide
cctaaaaaaggtctgc

SEQ ID NO: 1455 - DNA, 16 bp, Artificial sequence
  Synthetic oligonucleotide
cattaagcttgcttcc

SEQ ID NO: 1456 - DNA, 16 bp, Artificial sequence
  Synthetic oligonucleotide
cacaactagtcatact

SEQ ID NO: 1457 - DNA, 16 bp, Artificial sequence
  Synthetic oligonucleotide
aactgccagacacaac

SEQ ID NO: 1458 - DNA, 16 bp, Artificial sequence
  Synthetic oligonucleotide
ataaactgccagacac

SEQ ID NO: 1459 - DNA, 16 bp, Artificial sequence
  Synthetic oligonucleotide
tatcaggaatccaaga

SEQ ID NO: 1460 - DNA, 16 bp, Artificial sequence
  Synthetic oligonucleotide
ttgataacagaagcac

SEQ ID NO: 1461 - DNA, 16 bp, Artificial sequence
  Synthetic oligonucleotide
ttggtgtttgataaca

SEQ ID NO: 1462 - DNA, 16 bp, Artificial sequence
  Synthetic oligonucleotide
atgttggtgtttgata

SEQ ID NO: 1463 - DNA, 16 bp, Artificial sequence
  Synthetic oligonucleotide
ccgccactgtagcagc

SEQ ID NO: 1464 - DNA, 16 bp, Artificial sequence
  Synthetic oligonucleotide
cgccaccgccactgta

SEQ ID NO: 1465 - DNA, 16 bp, Artificial sequence
  Synthetic oligonucleotide
gccgcccgggctcagc

SEQ ID NO: 1466 - DNA, 16 bp, Artificial sequence
  Synthetic oligonucleotide
cgccgccgcccgggct

SEQ ID NO: 1467 - DNA, 16 bp, Artificial sequence
  Synthetic oligonucleotide
gagagcgcgggttcgc

SEQ ID NO: 1468 - DNA, 16 bp, Artificial sequence
  Synthetic oligonucleotide
ctactgaccccagttc

SEQ ID NO: 1469 - DNA, 16 bp, Artificial sequence
  Synthetic oligonucleotide
tcactctactgacccc

SEQ ID NO: 1470 - DNA, 16 bp, Artificial sequence
  Synthetic oligonucleotide
tcatgcggactggtgg

SEQ ID NO: 1471 - DNA, 16 bp, Artificial sequence
  Synthetic oligonucleotide
atgtgagcatggaccc

SEQ ID NO: 1472 - DNA, 16 bp, Artificial sequence
  Synthetic oligonucleotide
tcttgatatgtgagca

SEQ ID NO: 1473 - DNA, 16 bp, Artificial sequence
  Synthetic oligonucleotide
ttcaagttggtgagct

SEQ ID NO: 1474 - DNA, 16 bp, Artificial sequence
  Synthetic oligonucleotide
tgcttccttcaagttg

SEQ ID NO: 1475 - DNA, 16 bp, Artificial sequence
  Synthetic oligonucleotide
tgtaatttcattcatg

SEQ ID NO: 1476 - DNA, 16 bp, Artificial sequence
  Synthetic oligonucleotide
ccttttgccaagagca

SEQ ID NO: 1477 - DNA, 16 bp, Artificial sequence
  Synthetic oligonucleotide
gatccttttgccaaga

SEQ ID NO: 1478 - DNA, 16 bp, Artificial sequence
  Synthetic oligonucleotide
gctagtaatgttacat

SEQ ID NO: 1479 - DNA, 16 bp, Artificial sequence
  Synthetic oligonucleotide
gcaacttgctagtaat

SEQ ID NO: 1480 - DNA, 16 bp, Artificial sequence
  Synthetic oligonucleotide
tgtgcaacttgctagt

SEQ ID NO: 1481 - DNA, 16 bp, Artificial sequence
  Synthetic oligonucleotide
ggatttcagtttgaat

SEQ ID NO: 1482 - DNA, 16 bp, Artificial sequence
  Synthetic oligonucleotide
ctcagagccttggtag

SEQ ID NO: 1483 - DNA, 16 bp, Artificial sequence
  Synthetic oligonucleotide
caaacgcgcaaaagac

SEQ ID NO: 1484 - DNA, 16 bp, Artificial sequence
  Synthetic oligonucleotide
gcccgcacaaacgcgc

SEQ ID NO: 1485 - DNA, 16 bp, Artificial sequence
  Synthetic oligonucleotide
ggttaaagaagttgct

SEQ ID NO: 1486 - DNA, 16 bp, Artificial sequence
  Synthetic oligonucleotide
cccagtgaattcagca

SEQ ID NO: 1487 - DNA, 16 bp, Artificial sequence
  Synthetic oligonucleotide
gcgcccagtgaattca

SEQ ID NO: 1488 - DNA, 16 bp, Artificial sequence
  Synthetic oligonucleotide
aagatgcgcccagtga

SEQ ID NO: 1489 - DNA, 16 bp, Artificial sequence
  Synthetic oligonucleotide
tgtaagatgcgcccag

SEQ ID NO: 1490 - DNA, 16 bp, Artificial sequence
  Synthetic oligonucleotide
aattacttgtaagatg

SEQ ID NO: 1491 - DNA, 16 bp, Artificial sequence
  Synthetic oligonucleotide
cccagaaggcacttgt

SEQ ID NO: 1492 - DNA, 16 bp, Artificial sequence
  Synthetic oligonucleotide
ttgcagaacaaatctt

SEQ ID NO: 1493 - DNA, 16 bp, Artificial sequence
  Synthetic oligonucleotide
catggaagatttgcag

SEQ ID NO: 1494 - DNA, 16 bp, Artificial sequence
  Synthetic oligonucleotide
ggtcatggaagatttg

SEQ ID NO: 1495 - DNA, 16 bp, Artificial sequence
  Synthetic oligonucleotide
gaccttggtcatggaa

SEQ ID NO: 1496 - DNA, 16 bp, Artificial sequence
  Synthetic oligonucleotide
tgccaatccaaagagg

SEQ ID NO: 1497 - DNA, 16 bp, Artificial sequence
  Synthetic oligonucleotide
gggtctgccaatccaa

SEQ ID NO: 1498 - DNA, 16 bp, Artificial sequence
  Synthetic oligonucleotide
tccctgggtctgccaa

SEQ ID NO: 1499 - DNA, 16 bp, Artificial sequence
  Synthetic oligonucleotide
aagtgtgaatttatct

SEQ ID NO: 1500 - DNA, 16 bp, Artificial sequence
  Synthetic oligonucleotide
ggagatctcaacaagg

SEQ ID NO: 1501 - DNA, 16 bp, Artificial sequence
  Synthetic oligonucleotide
tcgcccatcactcttc

SEQ ID NO: 1502 - DNA, 16 bp, Artificial sequence
  Synthetic oligonucleotide
cctgtcgcccatcact

SEQ ID NO: 1503 - DNA, 16 bp, Artificial sequence
  Synthetic oligonucleotide
tcacctgtcgcccatc

SEQ ID NO: 1504 - DNA, 16 bp, Artificial sequence
  Synthetic oligonucleotide
ccatcacctgtcgccc

SEQ ID NO: 1505 - DNA, 16 bp, Artificial sequence
  Synthetic oligonucleotide
tcaccatcacctgtcg

SEQ ID NO: 1506 - DNA, 16 bp, Artificial sequence
  Synthetic oligonucleotide
taatagttgtcaccat

SEQ ID NO: 1507 - DNA, 16 bp, Artificial sequence
  Synthetic oligonucleotide
ttcagatcttattaat

SEQ ID NO: 1508 - DNA, 16 bp, Artificial sequence
  Synthetic oligonucleotide
ttgcaaattcagtctg

SEQ ID NO: 1509 - DNA, 16 bp, Artificial sequence
  Synthetic oligonucleotide
cgttctcttggaagta

SEQ ID NO: 1510 - DNA, 16 bp, Artificial sequence
  Synthetic oligonucleotide
tcttgaataaatttcg

SEQ ID NO: 1511 - DNA, 16 bp, Artificial sequence
  Synthetic oligonucleotide
aagctcactcttcaat

SEQ ID NO: 1512 - DNA, 16 bp, Artificial sequence
  Synthetic oligonucleotide
tccaagctcactcttc

SEQ ID NO: 1513 - DNA, 16 bp, Artificial sequence
  Synthetic oligonucleotide
gctcctgccactctgt

SEQ ID NO: 1514 - DNA, 16 bp, Artificial sequence
  Synthetic oligonucleotide
atgggcaaaggcatct

SEQ ID NO: 1515 - DNA, 16 bp, Artificial sequence
  Synthetic oligonucleotide
agtcttcccggcgagg

SEQ ID NO: 1516 - DNA, 16 bp, Artificial sequence
  Synthetic oligonucleotide
ccgccgctccctagcc

SEQ ID NO: 1517 - DNA, 16 bp, Artificial sequence
  Synthetic oligonucleotide
gcccgcaactccctgc

SEQ ID NO: 1518 - DNA, 16 bp, Artificial sequence
  Synthetic oligonucleotide
cgcctccccaggcgca

SEQ ID NO: 1519 - DNA, 16 bp, Artificial sequence
  Synthetic oligonucleotide
gagtgtcttcccaggc

SEQ ID NO: 1520 - DNA, 16 bp, Artificial sequence
  Synthetic oligonucleotide
ctgaagactccttgaa

SEQ ID NO: 1521 - DNA, 16 bp, Artificial sequence
  Synthetic oligonucleotide
ggctagccaagttgga

SEQ ID NO: 1522 - DNA, 16 bp, Artificial sequence
  Synthetic oligonucleotide
tgactccagtcttacc

SEQ ID NO: 1523 - DNA, 16 bp, Artificial sequence
  Synthetic oligonucleotide
attcattgtggtcagc

SEQ ID NO: 1524 - DNA, 16 bp, Artificial sequence
  Synthetic oligonucleotide
gaagtgggtttttccc

SEQ ID NO: 1525 - DNA, 16 bp, Artificial sequence
  Synthetic oligonucleotide
gccttggttcaggtga

SEQ ID NO: 1526 - DNA, 16 bp, Artificial sequence
  Synthetic oligonucleotide
ccactgtagcagccgc

SEQ ID NO: 1527 - DNA, 16 bp, Artificial sequence
  Synthetic oligonucleotide
taggtatttcagagcc

SEQ ID NO: 1528 - DNA, 16 bp, Artificial sequence
  Synthetic oligonucleotide
gtccaggcagagttgt

SEQ ID NO: 1529 - DNA, 16 bp, Artificial sequence
  Synthetic oligonucleotide
agccaaatgttggtca

SEQ ID NO: 1530 - DNA, 16 bp, Artificial sequence
  Synthetic oligonucleotide
gagggcgagtttttcc

SEQ ID NO: 1531 - DNA, 16 bp, Artificial sequence
  Synthetic oligonucleotide
gtggcattggcaagcc

SEQ ID NO: 1532 - DNA, 16 bp, Artificial sequence
  Synthetic oligonucleotide
accccactgcaccaag

SEQ ID NO: 1533 - DNA, 16 bp, Artificial sequence
  Synthetic oligonucleotide
tccaagtacttgccaa

SEQ ID NO: 1534 - DNA, 16 bp, Artificial sequence
  Synthetic oligonucleotide
agtgcctggcctaagg

SEQ ID NO: 1535 - DNA, 16 bp, Artificial sequence
  Synthetic oligonucleotide
gcgcttcttccctagg

SEQ ID NO: 1536 - DNA, 16 bp, Artificial sequence
  Synthetic oligonucleotide
catcttgcccagggat

SEQ ID NO: 1537 - DNA, 16 bp, Artificial sequence
  Synthetic oligonucleotide
ccatcttgctccaagt

SEQ ID NO: 1538 - DNA, 16 bp, Artificial sequence
  Synthetic oligonucleotide
cttacatcctgtaggc

SEQ ID NO: 1539 - DNA, 16 bp, Artificial sequence
  Synthetic oligonucleotide
cgcctcctggtcctca

SEQ ID NO: 1540 - DNA, 16 bp, Artificial sequence
  Synthetic oligonucleotide
ccctatgcactaccta

SEQ ID NO: 1541 - DNA, 16 bp, Artificial sequence
  Synthetic oligonucleotide
gagggactgtggtgct

SEQ ID NO: 1542 - DNA, 16 bp, Artificial sequence
  Synthetic oligonucleotide
gcccaatatgtgccag

SEQ ID NO: 1543 - DNA, 16 bp, Artificial sequence
  Synthetic oligonucleotide
gctctctcatcgctgg

SEQ ID NO: 1544 - DNA, 16 bp, Artificial sequence
  Synthetic oligonucleotide
ctcaaggctatgtgcc

SEQ ID NO: 1545 - DNA, 16 bp, Artificial sequence
  Synthetic oligonucleotide
tccacatccctcatgt

SEQ ID NO: 1546 - DNA, 16 bp, Artificial sequence
  Synthetic oligonucleotide
aggactgaaggcccat

SEQ ID NO: 1547 - DNA, 16 bp, Artificial sequence
  Synthetic oligonucleotide
gtgcgacttaccagct

SEQ ID NO: 1548 - DNA, 16 bp, Artificial sequence
  Synthetic oligonucleotide
tcgctaaagccacaca

SEQ ID NO: 1549 - DNA, 16 bp, Artificial sequence
  Synthetic oligonucleotide
gctctggctgatggtc

SEQ ID NO: 1550 - DNA, 16 bp, Artificial sequence
  Synthetic oligonucleotide
ttcccatgaggatttc

SEQ ID NO: 1551 - DNA, 16 bp, Artificial sequence
  Synthetic oligonucleotide
ttgggcttaagcacta

SEQ ID NO: 1552 - DNA, 16 bp, Artificial sequence
  Synthetic oligonucleotide
gctagcacctagtcca

SEQ ID NO: 1553 - DNA, 16 bp, Artificial sequence
  Synthetic oligonucleotide
cctctggcctacaaca

SEQ ID NO: 1554 - DNA, 16 bp, Artificial sequence
  Synthetic oligonucleotide
acccctcatcagcacc

SEQ ID NO: 1555 - DNA, 16 bp, Artificial sequence
  Synthetic oligonucleotide
ggccacccctgatcct

SEQ ID NO: 1556 - DNA, 16 bp, Artificial sequence
  Synthetic oligonucleotide
gaagctcccttgccca

SEQ ID NO: 1557 - DNA, 16 bp, Artificial sequence
  Synthetic oligonucleotide
agtgttgcccctccaa

SEQ ID NO: 1558 - DNA, 16 bp, Artificial sequence
  Synthetic oligonucleotide
gggtctccaacctact

SEQ ID NO: 1559 - DNA, 16 bp, Artificial sequence
  Synthetic oligonucleotide
gggatgtaggtttacc

SEQ ID NO: 1560 - DNA, 16 bp, Artificial sequence
  Synthetic oligonucleotide
gcaaccgatatcacag

SEQ ID NO: 1561 - DNA, 16 bp, Artificial sequence
  Synthetic oligonucleotide
tgccctggaacaaatt

SEQ ID NO: 1562 - DNA, 16 bp, Artificial sequence
  Synthetic oligonucleotide
agtctaggagtagcta

SEQ ID NO: 1563 - DNA, 16 bp, Artificial sequence
  Synthetic oligonucleotide
gctgttgtcaagagac

SEQ ID NO: 1564 - DNA, 16 bp, Artificial sequence
  Synthetic oligonucleotide
cacctagacactcagt

SEQ ID NO: 1565 - DNA, 16 bp, Artificial sequence
  Synthetic oligonucleotide
gtcaagggatccctgc

SEQ ID NO: 1566 - DNA, 16 bp, Artificial sequence
  Synthetic oligonucleotide
tccccctggcactcca

SEQ ID NO: 1567 - DNA, 16 bp, Artificial sequence
  Synthetic oligonucleotide
gcctggtaactccatt

SEQ ID NO: 1568 - DNA, 16 bp, Artificial sequence
  Synthetic oligonucleotide
gggctcaccaactgtg

SEQ ID NO: 1569 - DNA, 16 bp, Artificial sequence
  Synthetic oligonucleotide
ccacaggatcatatca

SEQ ID NO: 1570 - DNA, 16 bp, Artificial sequence
  Synthetic oligonucleotide
ctccagcagaagtgtc

SEQ ID NO: 1571 - DNA, 16 bp, Artificial sequence
  Synthetic oligonucleotide
agcccaactgttgcct

SEQ ID NO: 1572 - DNA, 16 bp, Artificial sequence
  Synthetic oligonucleotide
tgccaggcagttgcca

SEQ ID NO: 1573 - DNA, 16 bp, Artificial sequence
  Synthetic oligonucleotide
gccagtaagcaccttg

SEQ ID NO: 1574 - DNA, 16 bp, Artificial sequence
  Synthetic oligonucleotide
ctagcttcccagcccc

SEQ ID NO: 1575 - DNA, 16 bp, Artificial sequence
  Synthetic oligonucleotide
tcaagcccagctagca

SEQ ID NO: 1576 - DNA, 16 bp, Artificial sequence
  Synthetic oligonucleotide
cctcacaggccctaat

SEQ ID NO: 1577 - DNA, 16 bp, Artificial sequence
  Synthetic oligonucleotide
acctgcttacatggta

SEQ ID NO: 1578 - DNA, 16 bp, Artificial sequence
  Synthetic oligonucleotide
cctttgctaggaccca

SEQ ID NO: 1579 - DNA, 16 bp, Artificial sequence
  Synthetic oligonucleotide
gggactgccaccaagg

SEQ ID NO: 1580 - DNA, 16 bp, Artificial sequence
  Synthetic oligonucleotide
gctagatgttcaggcc

SEQ ID NO: 1581 - DNA, 16 bp, Artificial sequence
  Synthetic oligonucleotide
cctatggccatgctga

SEQ ID NO: 1582 - DNA, 16 bp, Artificial sequence
  Synthetic oligonucleotide
gtatgctagttcccat

SEQ ID NO: 1583 - DNA, 16 bp, Artificial sequence
  Synthetic oligonucleotide
ccctcataatcttggg

SEQ ID NO: 1584 - DNA, 16 bp, Artificial sequence
  Synthetic oligonucleotide
gtccaaccactaccac

SEQ ID NO: 1585 - DNA, 16 bp, Artificial sequence
  Synthetic oligonucleotide
acttgcagatagctga

SEQ ID NO: 1586 - DNA, 16 bp, Artificial sequence
  Synthetic oligonucleotide
gcatgaccccactgcc

SEQ ID NO: 1587 - DNA, 16 bp, Artificial sequence
  Synthetic oligonucleotide
gagggtcacattccct

SEQ ID NO: 1588 - DNA, 16 bp, Artificial sequence
  Synthetic oligonucleotide
tctcttactggtgggt

SEQ ID NO: 1589 - DNA, 16 bp, Artificial sequence
  Synthetic oligonucleotide
gcccccttcctggata

SEQ ID NO: 1590 - DNA, 16 bp, Artificial sequence
  Synthetic oligonucleotide
cctcatgcgacaccac

SEQ ID NO: 1591 - DNA, 16 bp, Artificial sequence
  Synthetic oligonucleotide
agccctctgcctgtaa

SEQ ID NO: 1592 - DNA, 16 bp, Artificial sequence
  Synthetic oligonucleotide
ctcccagctataggcg

SEQ ID NO: 1593 - DNA, 16 bp, Artificial sequence
  Synthetic oligonucleotide
gctagctgcgcaagga

SEQ ID NO: 1594 - DNA, 16 bp, Artificial sequence
  Synthetic oligonucleotide
gcgcagcccgctgcaa

SEQ ID NO: 1595 - DNA, 16 bp, Artificial sequence
  Synthetic oligonucleotide
tgcatgatccacccca

SEQ ID NO: 1596 - DNA, 16 bp, Artificial sequence
  Synthetic oligonucleotide
gcttagtgctggccca

SEQ ID NO: 1597 - DNA, 16 bp, Artificial sequence
  Synthetic oligonucleotide
ccttccagtcctcata

SEQ ID NO: 1598 - DNA, 16 bp, Artificial sequence
  Synthetic oligonucleotide
atagtgtcaaggccca

SEQ ID NO: 1599 - DNA, 16 bp, Artificial sequence
  Synthetic oligonucleotide
aggccttagtcaccca

SEQ ID NO: 1600 - DNA, 16 bp, Artificial sequence
  Synthetic oligonucleotide
taaccaacctaaggga

SEQ ID NO: 1601 - DNA, 16 bp, Artificial sequence
  Synthetic oligonucleotide
attctggtgatgccct

SEQ ID NO: 1602 - DNA, 16 bp, Artificial sequence
  Synthetic oligonucleotide
gtgttcactgccatga

SEQ ID NO: 1603 - DNA, 16 bp, Artificial sequence
  Synthetic oligonucleotide
ggtagagcacactgcc

SEQ ID NO: 1604 - DNA, 16 bp, Artificial sequence
  Synthetic oligonucleotide
ccactttaatgccacc

SEQ ID NO: 1605 - DNA, 16 bp, Artificial sequence
  Synthetic oligonucleotide
gtcaaatgctgttggg

SEQ ID NO: 1606 - DNA, 16 bp, Artificial sequence
  Synthetic oligonucleotide
catcccctatcagggt

SEQ ID NO: 1607 - DNA, 16 bp, Artificial sequence
  Synthetic oligonucleotide
ctcgaatcccttgagc

SEQ ID NO: 1608 - DNA, 16 bp, Artificial sequence
  Synthetic oligonucleotide
gattccctcccctaac

SEQ ID NO: 1609 - DNA, 16 bp, Artificial sequence
  Synthetic oligonucleotide
atccatccatgtgctg

SEQ ID NO: 1610 - DNA, 16 bp, Artificial sequence
  Synthetic oligonucleotide
gagcatgcctcagtgg

SEQ ID NO: 1611 - DNA, 16 bp, Artificial sequence
  Synthetic oligonucleotide
cagaaggactgcctct

SEQ ID NO: 1612 - DNA, 16 bp, Artificial sequence
  Synthetic oligonucleotide
acaatgctcaacagcc

SEQ ID NO: 1613 - DNA, 16 bp, Artificial sequence
  Synthetic oligonucleotide
gttggatctggcatgc

SEQ ID NO: 1614 - DNA, 16 bp, Artificial sequence
  Synthetic oligonucleotide
cggctgagagcaaggg

SEQ ID NO: 1615 - DNA, 16 bp, Artificial sequence
  Synthetic oligonucleotide
gagagggttcagcctg

SEQ ID NO: 1616 - DNA, 16 bp, Artificial sequence
  Synthetic oligonucleotide
acttagttcctagcca

SEQ ID NO: 1617 - DNA, 16 bp, Artificial sequence
  Synthetic oligonucleotide
gtgaaccagatgtgct

SEQ ID NO: 1618 - DNA, 16 bp, Artificial sequence
  Synthetic oligonucleotide
ggagtgacagctaagt

SEQ ID NO: 1619 - DNA, 16 bp, Artificial sequence
  Synthetic oligonucleotide
aagtgttcagagccac

SEQ ID NO: 1620 - DNA, 16 bp, Artificial sequence
  Synthetic oligonucleotide
aaccctgccaaggtac

SEQ ID NO: 1621 - DNA, 16 bp, Artificial sequence
  Synthetic oligonucleotide
gatggtgagcactacc

SEQ ID NO: 1622 - DNA, 16 bp, Artificial sequence
  Synthetic oligonucleotide
ggcaggataggacaga

SEQ ID NO: 1623 - DNA, 16 bp, Artificial sequence
  Synthetic oligonucleotide
gcaaagtgatgagcct

SEQ ID NO: 1624 - DNA, 16 bp, Artificial sequence
  Synthetic oligonucleotide
ctatccacaccattcc

SEQ ID NO: 1625 - DNA, 16 bp, Artificial sequence
  Synthetic oligonucleotide
ggatcatgggccccta

SEQ ID NO: 1626 - DNA, 16 bp, Artificial sequence
  Synthetic oligonucleotide
gtgaatttgctgggcc

SEQ ID NO: 1627 - DNA, 16 bp, Artificial sequence
  Synthetic oligonucleotide
gtgatgggcccaaggc

SEQ ID NO: 1628 - DNA, 16 bp, Artificial sequence
  Synthetic oligonucleotide
tcctcagtcggcttgc

SEQ ID NO: 1629 - DNA, 16 bp, Artificial sequence
  Synthetic oligonucleotide
cagccttttgccagat

SEQ ID NO: 1630 - DNA, 16 bp, Artificial sequence
  Synthetic oligonucleotide
cctccctaggattacc

SEQ ID NO: 1631 - DNA, 16 bp, Artificial sequence
  Synthetic oligonucleotide
acgccccaatcactca

SEQ ID NO: 1632 - DNA, 16 bp, Artificial sequence
  Synthetic oligonucleotide
gcatgacccattatgt

SEQ ID NO: 1633 - DNA, 16 bp, Artificial sequence
  Synthetic oligonucleotide
tccctccaagagctca

SEQ ID NO: 1634 - DNA, 16 bp, Artificial sequence
  Synthetic oligonucleotide
gatgcctgtggctgac

SEQ ID NO: 1635 - DNA, 16 bp, Artificial sequence
  Synthetic oligonucleotide
ggctagcatgttgcct

SEQ ID NO: 1636 - DNA, 16 bp, Artificial sequence
  Synthetic oligonucleotide
taacccactaggctgg

SEQ ID NO: 1637 - DNA, 16 bp, Artificial sequence
  Synthetic oligonucleotide
tggcccaaaactaatc

SEQ ID NO: 1638 - DNA, 16 bp, Artificial sequence
  Synthetic oligonucleotide
ggagcagtctggcacc

SEQ ID NO: 1639 - DNA, 16 bp, Artificial sequence
  Synthetic oligonucleotide
tattctgtgggacaag

SEQ ID NO: 1640 - DNA, 16 bp, Artificial sequence
  Synthetic oligonucleotide
gtgtctagttccagcc

SEQ ID NO: 1641 - DNA, 16 bp, Artificial sequence
  Synthetic oligonucleotide
tactatcatgtagcgc

SEQ ID NO: 1642 - DNA, 16 bp, Artificial sequence
  Synthetic oligonucleotide
tgcccttgtagtgaga

SEQ ID NO: 1643 - DNA, 16 bp, Artificial sequence
  Synthetic oligonucleotide
tccccaacctacaagc

SEQ ID NO: 1644 - DNA, 16 bp, Artificial sequence
  Synthetic oligonucleotide
gctctaggcatatgaa

SEQ ID NO: 1645 - DNA, 16 bp, Artificial sequence
  Synthetic oligonucleotide
tacctcccttgtaggg

SEQ ID NO: 1646 - DNA, 16 bp, Artificial sequence
  Synthetic oligonucleotide
ggttcccttgcagaga

SEQ ID NO: 1647 - DNA, 16 bp, Artificial sequence
  Synthetic oligonucleotide
gtgccctcttcatgcc

SEQ ID NO: 1648 - DNA, 16 bp, Artificial sequence
  Synthetic oligonucleotide
cctgtgtgcaactggc

SEQ ID NO: 1649 - DNA, 16 bp, Artificial sequence
  Synthetic oligonucleotide
ctgagtcatttgcctg

SEQ ID NO: 1650 - DNA, 16 bp, Artificial sequence
  Synthetic oligonucleotide
ggccttagtaggccag

SEQ ID NO: 1651 - DNA, 16 bp, Artificial sequence
  Synthetic oligonucleotide
gtccttgcagtcaacc

SEQ ID NO: 1652 - DNA, 16 bp, Artificial sequence
  Synthetic oligonucleotide
gctgggccaagtccat

SEQ ID NO: 1653 - DNA, 16 bp, Artificial sequence
  Synthetic oligonucleotide
tagggcactttttgcc

SEQ ID NO: 1654 - DNA, 16 bp, Artificial sequence
  Synthetic oligonucleotide
gctgaggtccctctct

SEQ ID NO: 1655 - DNA, 16 bp, Artificial sequence
  Synthetic oligonucleotide
ctttggtcccattgcc

SEQ ID NO: 1656 - DNA, 16 bp, Artificial sequence
  Synthetic oligonucleotide
ggaacatgccaagggc

SEQ ID NO: 1657 - DNA, 16 bp, Artificial sequence
  Synthetic oligonucleotide
aggtggtctcccttca

SEQ ID NO: 1658 - DNA, 16 bp, Artificial sequence
  Synthetic oligonucleotide
tcccaaagctcccctc

SEQ ID NO: 1659 - DNA, 16 bp, Artificial sequence
  Synthetic oligonucleotide
cctggcctagcaagct

SEQ ID NO: 1660 - DNA, 16 bp, Artificial sequence
  Synthetic oligonucleotide
tcttagccctgggcta

SEQ ID NO: 1661 - DNA, 16 bp, Artificial sequence
  Synthetic oligonucleotide
gacttggactgggctc

SEQ ID NO: 1662 - DNA, 16 bp, Artificial sequence
  Synthetic oligonucleotide
ggcctaggatctagga

SEQ ID NO: 1663 - DNA, 16 bp, Artificial sequence
  Synthetic oligonucleotide
gtcaggctagagggac

SEQ ID NO: 1664 - DNA, 16 bp, Artificial sequence
  Synthetic oligonucleotide
ggaagttctcccagcc

SEQ ID NO: 1665 - DNA, 16 bp, Artificial sequence
  Synthetic oligonucleotide
cctgactgatgtacac

SEQ ID NO: 1666 - DNA, 16 bp, Artificial sequence
  Synthetic oligonucleotide
ctctggcctagcctat

SEQ ID NO: 1667 - DNA, 16 bp, Artificial sequence
  Synthetic oligonucleotide
ggctgctgtcagatgc

SEQ ID NO: 1668 - DNA, 16 bp, Artificial sequence
  Synthetic oligonucleotide
tctcaggtgtaggcag

SEQ ID NO: 1669 - DNA, 16 bp, Artificial sequence
  Synthetic oligonucleotide
ggtcactgagactggg

SEQ ID NO: 1670 - DNA, 16 bp, Artificial sequence
  Synthetic oligonucleotide
acccactagcagctag

SEQ ID NO: 1671 - DNA, 16 bp, Artificial sequence
  Synthetic oligonucleotide
cggatgaggcagttag

SEQ ID NO: 1672 - DNA, 16 bp, Artificial sequence
  Synthetic oligonucleotide
tggtaggccctctggc

SEQ ID NO: 1673 - DNA, 16 bp, Artificial sequence
  Synthetic oligonucleotide
gtcacaaggtgggtgc

SEQ ID NO: 1674 - DNA, 16 bp, Artificial sequence
  Synthetic oligonucleotide
gtcttgccctcacgga

SEQ ID NO: 1675 - DNA, 16 bp, Artificial sequence
  Synthetic oligonucleotide
gcagtctgtggactta

SEQ ID NO: 1676 - DNA, 16 bp, Artificial sequence
  Synthetic oligonucleotide
tgctctctggtcacac

SEQ ID NO: 1677 - DNA, 16 bp, Artificial sequence
  Synthetic oligonucleotide
tatcccccagagccat

SEQ ID NO: 1678 - DNA, 16 bp, Artificial sequence
  Synthetic oligonucleotide
aaggtgagagggcact

SEQ ID NO: 1679 - DNA, 16 bp, Artificial sequence
  Synthetic oligonucleotide
gttttaacctcaccct

SEQ ID NO: 1680 - DNA, 16 bp, Artificial sequence
  Synthetic oligonucleotide
ccttccactgaccttc

SEQ ID NO: 1681 - DNA, 16 bp, Artificial sequence
  Synthetic oligonucleotide
gacactagcctaagcc

SEQ ID NO: 1682 - DNA, 16 bp, Artificial sequence
  Synthetic oligonucleotide
ggttagccctcagcct

SEQ ID NO: 1683 - DNA, 16 bp, Artificial sequence
  Synthetic oligonucleotide
tatgaaggttggacca

SEQ ID NO: 1684 - DNA, 16 bp, Artificial sequence
  Synthetic oligonucleotide
caaccagctcacctga

SEQ ID NO: 1685 - DNA, 16 bp, Artificial sequence
  Synthetic oligonucleotide
gggctccaaggctctc

SEQ ID NO: 1686 - DNA, 16 bp, Artificial sequence
  Synthetic oligonucleotide
agctgttacatgccaa

SEQ ID NO: 1687 - DNA, 16 bp, Artificial sequence
  Synthetic oligonucleotide
ggcccagaggttatag

SEQ ID NO: 1688 - DNA, 16 bp, Artificial sequence
  Synthetic oligonucleotide
gtccttagacccctca

SEQ ID NO: 1689 - DNA, 16 bp, Artificial sequence
  Synthetic oligonucleotide
gccctggctagagaca

SEQ ID NO: 1690 - DNA, 16 bp, Artificial sequence
  Synthetic oligonucleotide
catccagcagctggac

SEQ ID NO: 1691 - DNA, 16 bp, Artificial sequence
  Synthetic oligonucleotide
gactgaggtcatcaca

SEQ ID NO: 1692 - DNA, 16 bp, Artificial sequence
  Synthetic oligonucleotide
ggccaggcacatcatg

SEQ ID NO: 1693 - DNA, 16 bp, Artificial sequence
  Synthetic oligonucleotide
ggagctcattgagcca

SEQ ID NO: 1694 - DNA, 16 bp, Artificial sequence
  Synthetic oligonucleotide
gtgcccattgctgtgt

SEQ ID NO: 1695 - DNA, 16 bp, Artificial sequence
  Synthetic oligonucleotide
ccaagtgtggcttcag

SEQ ID NO: 1696 - DNA, 16 bp, Artificial sequence
  Synthetic oligonucleotide
ccaccctttatacgca

SEQ ID NO: 1697 - DNA, 16 bp, Artificial sequence
  Synthetic oligonucleotide
cagtaaccccaaggga

SEQ ID NO: 1698 - DNA, 16 bp, Artificial sequence
  Synthetic oligonucleotide
ccccaccttatatggg

SEQ ID NO: 1699 - DNA, 16 bp, Artificial sequence
  Synthetic oligonucleotide
aggccctttttacatg

SEQ ID NO: 1700 - DNA, 16 bp, Artificial sequence
  Synthetic oligonucleotide
tcaataagtccctagg

SEQ ID NO: 1701 - DNA, 16 bp, Artificial sequence
  Synthetic oligonucleotide
ggcattgagtgactgc

SEQ ID NO: 1702 - DNA, 16 bp, Artificial sequence
  Synthetic oligonucleotide
ataatgccttctcagc

SEQ ID NO: 1703 - DNA, 16 bp, Artificial sequence
  Synthetic oligonucleotide
gtgaggcatttagccc

SEQ ID NO: 1704 - DNA, 16 bp, Artificial sequence
  Synthetic oligonucleotide
gctcttgtgttgggta

SEQ ID NO: 1705 - DNA, 16 bp, Artificial sequence
  Synthetic oligonucleotide
tgtgcaggaggtctca

SEQ ID NO: 1706 - DNA, 16 bp, Artificial sequence
  Synthetic oligonucleotide
tggagagtcttgtctc

SEQ ID NO: 1707 - DNA, 16 bp, Artificial sequence
  Synthetic oligonucleotide
gtgacccacccaagag

SEQ ID NO: 1708 - DNA, 16 bp, Artificial sequence
  Synthetic oligonucleotide
gttgtagctagtgttc

SEQ ID NO: 1709 - DNA, 16 bp, Artificial sequence
  Synthetic oligonucleotide
gccttagtttgtgcca

SEQ ID NO: 1710 - DNA, 16 bp, Artificial sequence
  Synthetic oligonucleotide
gccccagctgagaatt

SEQ ID NO: 1711 - DNA, 16 bp, Artificial sequence
  Synthetic oligonucleotide
acaacaatccagggtg

SEQ ID NO: 1712 - DNA, 16 bp, Artificial sequence
  Synthetic oligonucleotide
ctcccctggaagtcac

SEQ ID NO: 1713 - DNA, 16 bp, Artificial sequence
  Synthetic oligonucleotide
gccctcatggctcaag

SEQ ID NO: 1714 - DNA, 16 bp, Artificial sequence
  Synthetic oligonucleotide
tcagcagatagggagc

SEQ ID NO: 1715 - DNA, 16 bp, Artificial sequence
  Synthetic oligonucleotide
gaatgcggtgatcagg

SEQ ID NO: 1716 - DNA, 16 bp, Artificial sequence
  Synthetic oligonucleotide
ctgagagaattggccc

SEQ ID NO: 1717 - DNA, 16 bp, Artificial sequence
  Synthetic oligonucleotide
aggcacattgttacca

SEQ ID NO: 1718 - DNA, 16 bp, Artificial sequence
  Synthetic oligonucleotide
gggaggcactagagaa

SEQ ID NO: 1719 - DNA, 16 bp, Artificial sequence
  Synthetic oligonucleotide
tacagtaacacatccc

SEQ ID NO: 1720 - DNA, 16 bp, Artificial sequence
  Synthetic oligonucleotide
gaagctcagcctgatc

SEQ ID NO: 1721 - DNA, 16 bp, Artificial sequence
  Synthetic oligonucleotide
cttgcctgacaaccta

SEQ ID NO: 1722 - DNA, 16 bp, Artificial sequence
  Synthetic oligonucleotide
gcctacctgcttttgc

SEQ ID NO: 1723 - DNA, 16 bp, Artificial sequence
  Synthetic oligonucleotide
tttcccaaccacttag

SEQ ID NO: 1724 - DNA, 16 bp, Artificial sequence
  Synthetic oligonucleotide
tctcctatttcagtta

SEQ ID NO: 1725 - DNA, 16 bp, Artificial sequence
  Synthetic oligonucleotide
gggtgatggatgaact

SEQ ID NO: 1726 - DNA, 16 bp, Artificial sequence
  Synthetic oligonucleotide
acactgctggtagtga

SEQ ID NO: 1727 - DNA, 16 bp, Artificial sequence
  Synthetic oligonucleotide
acccaactagcctgtc

SEQ ID NO: 1728 - DNA, 16 bp, Artificial sequence
  Synthetic oligonucleotide
gagacctgctgcctga

SEQ ID NO: 1729 - DNA, 16 bp, Artificial sequence
  Synthetic oligonucleotide
acatctcttgggaggt

SEQ ID NO: 1730 - DNA, 16 bp, Artificial sequence
  Synthetic oligonucleotide
acatagtacccctcca

SEQ ID NO: 1731 - DNA, 16 bp, Artificial sequence
  Synthetic oligonucleotide
ctctcaagtacctgcc

SEQ ID NO: 1732 - DNA, 16 bp, Artificial sequence
  Synthetic oligonucleotide
tttgtacccaaccccc

SEQ ID NO: 1733 - DNA, 16 bp, Artificial sequence
  Synthetic oligonucleotide
aggcccacataaatgc

SEQ ID NO: 1734 - DNA, 16 bp, Artificial sequence
  Synthetic oligonucleotide
gagcatcccctacact

SEQ ID NO: 1735 - DNA, 16 bp, Artificial sequence
  Synthetic oligonucleotide
gctgggcctttagctg

SEQ ID NO: 1736 - DNA, 16 bp, Artificial sequence
  Synthetic oligonucleotide
ttggtcaattgggcag

SEQ ID NO: 1737 - DNA, 16 bp, Artificial sequence
  Synthetic oligonucleotide
gtctcatgaggcctat

SEQ ID NO: 1738 - DNA, 16 bp, Artificial sequence
  Synthetic oligonucleotide
ggaggtgggatcccac

SEQ ID NO: 1739 - DNA, 16 bp, Artificial sequence
  Synthetic oligonucleotide
gcccactacctagcac

SEQ ID NO: 1740 - DNA, 16 bp, Artificial sequence
  Synthetic oligonucleotide
cccagctggctggtcg

SEQ ID NO: 1741 - DNA, 16 bp, Artificial sequence
  Synthetic oligonucleotide
gcaccaggtctcctgt

SEQ ID NO: 1742 - DNA, 16 bp, Artificial sequence
  Synthetic oligonucleotide
gtctagaagcctaggg

SEQ ID NO: 1743 - DNA, 16 bp, Artificial sequence
  Synthetic oligonucleotide
gccgggtgttggtgca

SEQ ID NO: 1744 - DNA, 16 bp, Artificial sequence
  Synthetic oligonucleotide
ttggtgcctgtgttgc

SEQ ID NO: 1745 - DNA, 16 bp, Artificial sequence
  Synthetic oligonucleotide
tgcttctgatccctac

SEQ ID NO: 1746 - DNA, 16 bp, Artificial sequence
  Synthetic oligonucleotide
gttcccaggaggctta

SEQ ID NO: 1747 - DNA, 16 bp, Artificial sequence
  Synthetic oligonucleotide
aggcccctagagtcta

SEQ ID NO: 1748 - DNA, 16 bp, Artificial sequence
  Synthetic oligonucleotide
tggtgtgcccagactt

SEQ ID NO: 1749 - DNA, 16 bp, Artificial sequence
  Synthetic oligonucleotide
gatggctaacccactg

SEQ ID NO: 1750 - DNA, 16 bp, Artificial sequence
  Synthetic oligonucleotide
cccccaaaagttgccc

SEQ ID NO: 1751 - DNA, 16 bp, Artificial sequence
  Synthetic oligonucleotide
tagggtgttccagatc

SEQ ID NO: 1752 - DNA, 16 bp, Artificial sequence
  Synthetic oligonucleotide
gtaccatgaagctctg

SEQ ID NO: 1753 - DNA, 16 bp, Artificial sequence
  Synthetic oligonucleotide
cttggacttggaccat

SEQ ID NO: 1754 - DNA, 16 bp, Artificial sequence
  Synthetic oligonucleotide
gtgcatagggcctgtc

SEQ ID NO: 1755 - DNA, 16 bp, Artificial sequence
  Synthetic oligonucleotide
cctcacctgaacaccc

SEQ ID NO: 1756 - DNA, 16 bp, Artificial sequence
  Synthetic oligonucleotide
atgcctccccgcaact

SEQ ID NO: 1757 - DNA, 16 bp, Artificial sequence
  Synthetic oligonucleotide
ttgtgcttgggtgtac

SEQ ID NO: 1758 - DNA, 16 bp, Artificial sequence
  Synthetic oligonucleotide
aggcttcatgtgaggt

SEQ ID NO: 1759 - DNA, 16 bp, Artificial sequence
  Synthetic oligonucleotide
tgtaaaaggtcctccc

SEQ ID NO: 1760 - DNA, 16 bp, Artificial sequence
  Synthetic oligonucleotide
gacctgtgcagcaggt

SEQ ID NO: 1761 - DNA, 16 bp, Artificial sequence
  Synthetic oligonucleotide
tcctcttggagatcca

SEQ ID NO: 1762 - DNA, 16 bp, Artificial sequence
  Synthetic oligonucleotide
aggtcataggactgct

SEQ ID NO: 1763 - DNA, 16 bp, Artificial sequence
  Synthetic oligonucleotide
gaaggtcagactaggg

SEQ ID NO: 1764 - DNA, 16 bp, Artificial sequence
  Synthetic oligonucleotide
tctgtagactgcccag

SEQ ID NO: 1765 - DNA, 16 bp, Artificial sequence
  Synthetic oligonucleotide
gtccctctattcccct

SEQ ID NO: 1766 - DNA, 16 bp, Artificial sequence
  Synthetic oligonucleotide
aattgccatgctccca

SEQ ID NO: 1767 - DNA, 16 bp, Artificial sequence
  Synthetic oligonucleotide
gatgaccttcctccaa

SEQ ID NO: 1768 - DNA, 16 bp, Artificial sequence
  Synthetic oligonucleotide
gtttccagtagcacct

SEQ ID NO: 1769 - DNA, 16 bp, Artificial sequence
  Synthetic oligonucleotide
ggccttgagctgatgg

SEQ ID NO: 1770 - DNA, 16 bp, Artificial sequence
  Synthetic oligonucleotide
tatccctaatcaggct

SEQ ID NO: 1771 - DNA, 16 bp, Artificial sequence
  Synthetic oligonucleotide
ggtgtccacatcccgg

SEQ ID NO: 1772 - DNA, 16 bp, Artificial sequence
  Synthetic oligonucleotide
agctggacaggccata

SEQ ID NO: 1773 - DNA, 16 bp, Artificial sequence
  Synthetic oligonucleotide
ggtaatcacccagaga

SEQ ID NO: 1774 - DNA, 16 bp, Artificial sequence
  Synthetic oligonucleotide
gcgctaagtctgctgt

SEQ ID NO: 1775 - DNA, 16 bp, Artificial sequence
  Synthetic oligonucleotide
cctcaaatcttgccca

SEQ ID NO: 1776 - DNA, 16 bp, Artificial sequence
  Synthetic oligonucleotide
atccagacctggcaga

SEQ ID NO: 1777 - DNA, 16 bp, Artificial sequence
  Synthetic oligonucleotide
atccctgctcaagtgc

SEQ ID NO: 1778 - DNA, 16 bp, Artificial sequence
  Synthetic oligonucleotide
caggcactccttggaa

SEQ ID NO: 1779 - DNA, 16 bp, Artificial sequence
  Synthetic oligonucleotide
agctgaggtatccctc

SEQ ID NO: 1780 - DNA, 16 bp, Artificial sequence
  Synthetic oligonucleotide
gggcccagcaagtctt

SEQ ID NO: 1781 - DNA, 16 bp, Artificial sequence
  Synthetic oligonucleotide
gttttgtcagtgtgca

SEQ ID NO: 1782 - DNA, 16 bp, Artificial sequence
  Synthetic oligonucleotide
gtgacctgctgaactc

SEQ ID NO: 1783 - DNA, 16 bp, Artificial sequence
  Synthetic oligonucleotide
ggctgaactgtgcacc

SEQ ID NO: 1784 - DNA, 16 bp, Artificial sequence
  Synthetic oligonucleotide
gggtggtcccactcct

SEQ ID NO: 1785 - DNA, 16 bp, Artificial sequence
  Synthetic oligonucleotide
gaggaatcctgggccc

SEQ ID NO: 1786 - DNA, 16 bp, Artificial sequence
  Synthetic oligonucleotide
atgacaagctaggtgc

SEQ ID NO: 1787 - DNA, 16 bp, Artificial sequence
  Synthetic oligonucleotide
ttgccagacagggcac

SEQ ID NO: 1788 - DNA, 16 bp, Artificial sequence
  Synthetic oligonucleotide
agacccctcccactat

SEQ ID NO: 1789 - DNA, 16 bp, Artificial sequence
  Synthetic oligonucleotide
ggtgctgggtgaccgg

SEQ ID NO: 1790 - DNA, 16 bp, Artificial sequence
  Synthetic oligonucleotide
ggccaaacggtgccct

SEQ ID NO: 1791 - DNA, 16 bp, Artificial sequence
  Synthetic oligonucleotide
tgggtgaatagcaacc

SEQ ID NO: 1792 - DNA, 16 bp, Artificial sequence
  Synthetic oligonucleotide
gcccccaaggaagtga

SEQ ID NO: 1793 - DNA, 16 bp, Artificial sequence
  Synthetic oligonucleotide
caggcttcatgtgtgg

SEQ ID NO: 1794 - DNA, 16 bp, Artificial sequence
  Synthetic oligonucleotide
ctgtcagtgctttggt

SEQ ID NO: 1795 - DNA, 16 bp, Artificial sequence
  Synthetic oligonucleotide
gagtaccctggcaggt

SEQ ID NO: 1796 - DNA, 16 bp, Artificial sequence
  Synthetic oligonucleotide
tagctagcacctgggt

SEQ ID NO: 1797 - DNA, 16 bp, Artificial sequence
  Synthetic oligonucleotide
ggcaaacctttgagcc

SEQ ID NO: 1798 - DNA, 16 bp, Artificial sequence
  Synthetic oligonucleotide
gctatcattggagcag

SEQ ID NO: 1799 - DNA, 16 bp, Artificial sequence
  Synthetic oligonucleotide
cctctgagtactccct

SEQ ID NO: 1800 - DNA, 16 bp, Artificial sequence
  Synthetic oligonucleotide
agctgaaggcaaccag

SEQ ID NO: 1801 - DNA, 16 bp, Artificial sequence
  Synthetic oligonucleotide
gggcagttttccatag

SEQ ID NO: 1802 - DNA, 16 bp, Artificial sequence
  Synthetic oligonucleotide
ggtcctacctctgaca

SEQ ID NO: 1803 - DNA, 16 bp, Artificial sequence
  Synthetic oligonucleotide
ggctgccttagggtgg

SEQ ID NO: 1804 - DNA, 16 bp, Artificial sequence
  Synthetic oligonucleotide
cgcacctcccccacta

SEQ ID NO: 1805 - DNA, 16 bp, Artificial sequence
  Synthetic oligonucleotide
gcttattggtccatgg

SEQ ID NO: 1806 - DNA, 16 bp, Artificial sequence
  Synthetic oligonucleotide
aaccgcagagccccca

SEQ ID NO: 1807 - DNA, 16 bp, Artificial sequence
  Synthetic oligonucleotide
gggcttgttctgccaa

SEQ ID NO: 1808 - DNA, 16 bp, Artificial sequence
  Synthetic oligonucleotide
gggacctgcgctgact

SEQ ID NO: 1809 - DNA, 16 bp, Artificial sequence
  Synthetic oligonucleotide
ctttcacctggtgact

SEQ ID NO: 1810 - DNA, 16 bp, Artificial sequence
  Synthetic oligonucleotide
agcttgagggagtata

SEQ ID NO: 1811 - DNA, 16 bp, Artificial sequence
  Synthetic oligonucleotide
gcctgctcaattgagg

SEQ ID NO: 1812 - DNA, 16 bp, Artificial sequence
  Synthetic oligonucleotide
atagcagctggctgcc

SEQ ID NO: 1813 - DNA, 16 bp, Artificial sequence
  Synthetic oligonucleotide
aaaagcttggcacccc

SEQ ID NO: 1814 - DNA, 16 bp, Artificial sequence
  Synthetic oligonucleotide
cctggcaagaagggcc

SEQ ID NO: 1815 - DNA, 16 bp, Artificial sequence
  Synthetic oligonucleotide
ttagcccatctatccc

SEQ ID NO: 1816 - DNA, 16 bp, Artificial sequence
  Synthetic oligonucleotide
gtggtctccctgtgcc

SEQ ID NO: 1817 - DNA, 16 bp, Artificial sequence
  Synthetic oligonucleotide
agccctctctggcaaa

SEQ ID NO: 1818 - DNA, 16 bp, Artificial sequence
  Synthetic oligonucleotide
ttactgtggcccgagt

SEQ ID NO: 1819 - DNA, 16 bp, Artificial sequence
  Synthetic oligonucleotide
gtagactcctagggtc

SEQ ID NO: 1820 - DNA, 16 bp, Artificial sequence
  Synthetic oligonucleotide
cctccagttagtgtgc

SEQ ID NO: 1821 - DNA, 16 bp, Artificial sequence
  Synthetic oligonucleotide
gtgggtggccaacagg

SEQ ID NO: 1822 - DNA, 16 bp, Artificial sequence
  Synthetic oligonucleotide
gggattccctggtagc

SEQ ID NO: 1823 - DNA, 16 bp, Artificial sequence
  Synthetic oligonucleotide
gtgagaccggcctttg

SEQ ID NO: 1824 - DNA, 16 bp, Artificial sequence
  Synthetic oligonucleotide
actggcacccacttgg

SEQ ID NO: 1825 - DNA, 16 bp, Artificial sequence
  Synthetic oligonucleotide
attggcctaatgcccc

SEQ ID NO: 1826 - DNA, 16 bp, Artificial sequence
  Synthetic oligonucleotide
aggctatacattccag

SEQ ID NO: 1827 - DNA, 16 bp, Artificial sequence
  Synthetic oligonucleotide
ggtggcagctaggtgg

SEQ ID NO: 1828 - DNA, 16 bp, Artificial sequence
  Synthetic oligonucleotide
tccacagttggcactg

SEQ ID NO: 1829 - DNA, 16 bp, Artificial sequence
  Synthetic oligonucleotide
tgggccttagattgta

SEQ ID NO: 1830 - DNA, 16 bp, Artificial sequence
  Synthetic oligonucleotide
tgtcttcctggtggcc

SEQ ID NO: 1831 - DNA, 16 bp, Artificial sequence
  Synthetic oligonucleotide
cccgcctctccagcaa

SEQ ID NO: 1832 - DNA, 16 bp, Artificial sequence
  Synthetic oligonucleotide
gcagcagccaataagt

SEQ ID NO: 1833 - DNA, 16 bp, Artificial sequence
  Synthetic oligonucleotide
ttgtatcctggcccct

SEQ ID NO: 1834 - DNA, 16 bp, Artificial sequence
  Synthetic oligonucleotide
gcctcatgggccttac

SEQ ID NO: 1835 - DNA, 16 bp, Artificial sequence
  Synthetic oligonucleotide
ggatgccagtcttggc

SEQ ID NO: 1836 - DNA, 16 bp, Artificial sequence
  Synthetic oligonucleotide
ctgctctcagtacctc

SEQ ID NO: 1837 - DNA, 16 bp, Artificial sequence
  Synthetic oligonucleotide
acccaagaagtcacct

SEQ ID NO: 1838 - DNA, 16 bp, Artificial sequence
  Synthetic oligonucleotide
gcctcaagccctaccc

SEQ ID NO: 1839 - DNA, 16 bp, Artificial sequence
  Synthetic oligonucleotide
agctccagcctataga

SEQ ID NO: 1840 - DNA, 16 bp, Artificial sequence
  Synthetic oligonucleotide
ggtccacatggcccta

SEQ ID NO: 1841 - DNA, 16 bp, Artificial sequence
  Synthetic oligonucleotide
caggcccaggattgtc

SEQ ID NO: 1842 - DNA, 16 bp, Artificial sequence
  Synthetic oligonucleotide
gggcctgctttgcagc

SEQ ID NO: 1843 - DNA, 16 bp, Artificial sequence
  Synthetic oligonucleotide
actcctctctttaggc

SEQ ID NO: 1844 - DNA, 16 bp, Artificial sequence
  Synthetic oligonucleotide
ctgggtaacagtcctc

SEQ ID NO: 1845 - DNA, 16 bp, Artificial sequence
  Synthetic oligonucleotide
actgtatggtttccac

SEQ ID NO: 1846 - DNA, 16 bp, Artificial sequence
  Synthetic oligonucleotide
gccaaagatagctctt

SEQ ID NO: 1847 - DNA, 16 bp, Artificial sequence
  Synthetic oligonucleotide
ggcattggaagttggt

SEQ ID NO: 1848 - DNA, 16 bp, Artificial sequence
  Synthetic oligonucleotide
cccttcctgaccttac

SEQ ID NO: 1849 - DNA, 16 bp, Artificial sequence
  Synthetic oligonucleotide
ttaccctctattcacc

SEQ ID NO: 1850 - DNA, 16 bp, Artificial sequence
  Synthetic oligonucleotide
ggcaccccaggccggg

SEQ ID NO: 1851 - DNA, 16 bp, Artificial sequence
  Synthetic oligonucleotide
cagcagctagttcccc

SEQ ID NO: 1852 - DNA, 16 bp, Artificial sequence
  Synthetic oligonucleotide
gtgggcactagtgtgt

SEQ ID NO: 1853 - DNA, 16 bp, Artificial sequence
  Synthetic oligonucleotide
tgcccttgtcagggca

SEQ ID NO: 1854 - DNA, 16 bp, Artificial sequence
  Synthetic oligonucleotide
gcagataggctcagca

SEQ ID NO: 1855 - DNA, 16 bp, Artificial sequence
  Synthetic oligonucleotide
ccctagcccttagcac

SEQ ID NO: 1856 - DNA, 16 bp, Artificial sequence
  Synthetic oligonucleotide
actggaatggccctct

SEQ ID NO: 1857 - DNA, 16 bp, Artificial sequence
  Synthetic oligonucleotide
tttgctcatgctcaca

SEQ ID NO: 1858 - DNA, 16 bp, Artificial sequence
  Synthetic oligonucleotide
gcctttgtgtgtcact

SEQ ID NO: 1859 - DNA, 16 bp, Artificial sequence
  Synthetic oligonucleotide
tatgtggtagcatgtc

SEQ ID NO: 1860 - DNA, 16 bp, Artificial sequence
  Synthetic oligonucleotide
ccccaggaagttggcc

SEQ ID NO: 1861 - DNA, 16 bp, Artificial sequence
  Synthetic oligonucleotide
tagctgtcaaggccct

SEQ ID NO: 1862 - DNA, 16 bp, Artificial sequence
  Synthetic oligonucleotide
cctagtcagccactag

SEQ ID NO: 1863 - DNA, 16 bp, Artificial sequence
  Synthetic oligonucleotide
agactccccatcagcc

SEQ ID NO: 1864 - DNA, 16 bp, Artificial sequence
  Synthetic oligonucleotide
gtgaagggccttcatc

SEQ ID NO: 1865 - DNA, 16 bp, Artificial sequence
  Synthetic oligonucleotide
ggttgagagtccaatg

SEQ ID NO: 1866 - DNA, 16 bp, Artificial sequence
  Synthetic oligonucleotide
cagctaattccctcat

SEQ ID NO: 1867 - DNA, 16 bp, Artificial sequence
  Synthetic oligonucleotide
ttgtgtctcaacccac

SEQ ID NO: 1868 - DNA, 16 bp, Artificial sequence
  Synthetic oligonucleotide
ggctatgctgcatgct

SEQ ID NO: 1869 - DNA, 16 bp, Artificial sequence
  Synthetic oligonucleotide
ccccatacccagtgga

SEQ ID NO: 1870 - DNA, 16 bp, Artificial sequence
  Synthetic oligonucleotide
ggtggttttcctccct

SEQ ID NO: 1871 - DNA, 16 bp, Artificial sequence
  Synthetic oligonucleotide
gagcctgcccaacttt

SEQ ID NO: 1872 - DNA, 16 bp, Artificial sequence
  Synthetic oligonucleotide
tgatgcccaagagtga

SEQ ID NO: 1873 - DNA, 16 bp, Artificial sequence
  Synthetic oligonucleotide
ttccctctgcgaacat

SEQ ID NO: 1874 - DNA, 16 bp, Artificial sequence
  Synthetic oligonucleotide
gttccatctcaatcca

SEQ ID NO: 1875 - DNA, 16 bp, Artificial sequence
  Synthetic oligonucleotide
acggccactccactgg

SEQ ID NO: 1876 - DNA, 16 bp, Artificial sequence
  Synthetic oligonucleotide
tggaagtggttccaga

SEQ ID NO: 1877 - DNA, 16 bp, Artificial sequence
  Synthetic oligonucleotide
ttgccccagaccaaca

SEQ ID NO: 1878 - DNA, 16 bp, Artificial sequence
  Synthetic oligonucleotide
gaggttgtggaggtgc

SEQ ID NO: 1879 - DNA, 16 bp, Artificial sequence
  Synthetic oligonucleotide
gagttgctgtgtgtga

SEQ ID NO: 1880 - DNA, 16 bp, Artificial sequence
  Synthetic oligonucleotide
catgtcagaggtgtcc

SEQ ID NO: 1881 - DNA, 16 bp, Artificial sequence
  Synthetic oligonucleotide
aggtaaggatcatggc

SEQ ID NO: 1882 - DNA, 16 bp, Artificial sequence
  Synthetic oligonucleotide
gttcagttgcatcacg

SEQ ID NO: 1883 - DNA, 16 bp, Artificial sequence
  Synthetic oligonucleotide
gcccagctagccaccc

SEQ ID NO: 1884 - DNA, 16 bp, Artificial sequence
  Synthetic oligonucleotide
ccttagcagccaggcc

SEQ ID NO: 1885 - DNA, 16 bp, Artificial sequence
  Synthetic oligonucleotide
gcacttagggttttgc

SEQ ID NO: 1886 - DNA, 16 bp, Artificial sequence
  Synthetic oligonucleotide
gttgaactttccctac

SEQ ID NO: 1887 - DNA, 16 bp, Artificial sequence
  Synthetic oligonucleotide
tgactccttgagacag

SEQ ID NO: 1888 - DNA, 16 bp, Artificial sequence
  Synthetic oligonucleotide
tgcgctggcttagcaa

SEQ ID NO: 1889 - DNA, 16 bp, Artificial sequence
  Synthetic oligonucleotide
ggcctaacatcagcag

SEQ ID NO: 1890 - DNA, 16 bp, Artificial sequence
  Synthetic oligonucleotide
actcctcccagttagc

SEQ ID NO: 1891 - DNA, 16 bp, Artificial sequence
  Synthetic oligonucleotide
accagtggccaatgtc

SEQ ID NO: 1892 - DNA, 16 bp, Artificial sequence
  Synthetic oligonucleotide
gcctagacacagtagg

SEQ ID NO: 1893 - DNA, 16 bp, Artificial sequence
  Synthetic oligonucleotide
tattctccccctaggg

SEQ ID NO: 1894 - DNA, 16 bp, Artificial sequence
  Synthetic oligonucleotide
gacggccttgggcaca

SEQ ID NO: 1895 - DNA, 16 bp, Artificial sequence
  Synthetic oligonucleotide
gcaggctgtattagca

SEQ ID NO: 1896 - DNA, 16 bp, Artificial sequence
  Synthetic oligonucleotide
accccctatcctgcac

SEQ ID NO: 1897 - DNA, 16 bp, Artificial sequence
  Synthetic oligonucleotide
tcctccatacctagag

SEQ ID NO: 1898 - DNA, 16 bp, Artificial sequence
  Synthetic oligonucleotide
gataggtgcccactgt

SEQ ID NO: 1899 - DNA, 16 bp, Artificial sequence
  Synthetic oligonucleotide
gtcagttctggctagg

SEQ ID NO: 1900 - DNA, 16 bp, Artificial sequence
  Synthetic oligonucleotide
gcctgaacttacaagc

SEQ ID NO: 1901 - DNA, 16 bp, Artificial sequence
  Synthetic oligonucleotide
accctgggctgacctt

SEQ ID NO: 1902 - DNA, 16 bp, Artificial sequence
  Synthetic oligonucleotide
ggacctggacaagcaa

SEQ ID NO: 1903 - DNA, 16 bp, Artificial sequence
  Synthetic oligonucleotide
ctccttgcgagagagg

SEQ ID NO: 1904 - DNA, 16 bp, Artificial sequence
  Synthetic oligonucleotide
agagttgacatgggca

SEQ ID NO: 1905 - DNA, 16 bp, Artificial sequence
  Synthetic oligonucleotide
cactaggtccctgacc

SEQ ID NO: 1906 - DNA, 16 bp, Artificial sequence
  Synthetic oligonucleotide
cactctcttgggctgt

SEQ ID NO: 1907 - DNA, 16 bp, Artificial sequence
  Synthetic oligonucleotide
agggacctgcattcca

SEQ ID NO: 1908 - DNA, 16 bp, Artificial sequence
  Synthetic oligonucleotide
ttcaccacccattggg

SEQ ID NO: 1909 - DNA, 16 bp, Artificial sequence
  Synthetic oligonucleotide
atctggtctgagggcc

SEQ ID NO: 1910 - DNA, 16 bp, Artificial sequence
  Synthetic oligonucleotide
gacatgcaattgaccc

SEQ ID NO: 1911 - DNA, 16 bp, Artificial sequence
  Synthetic oligonucleotide
gtgtgcagcagactgt

SEQ ID NO: 1912 - DNA, 16 bp, Artificial sequence
  Synthetic oligonucleotide
gacagtccagctgcaa

SEQ ID NO: 1913 - DNA, 16 bp, Artificial sequence
  Synthetic oligonucleotide
cctgcggcagtgaaga

SEQ ID NO: 1914 - DNA, 16 bp, Artificial sequence
  Synthetic oligonucleotide
ctctgaggataaccct

SEQ ID NO: 1915 - DNA, 16 bp, Artificial sequence
  Synthetic oligonucleotide
gttcccagctccccaa

SEQ ID NO: 1916 - DNA, 16 bp, Artificial sequence
  Synthetic oligonucleotide
tagggtcagtgtccca

SEQ ID NO: 1917 - DNA, 16 bp, Artificial sequence
  Synthetic oligonucleotide
ggcgagcctctcagcc

SEQ ID NO: 1918 - DNA, 16 bp, Artificial sequence
  Synthetic oligonucleotide
gactcatccaggcagt

SEQ ID NO: 1919 - DNA, 16 bp, Artificial sequence
  Synthetic oligonucleotide
tccctcccttaggcac

SEQ ID NO: 1920 - DNA, 16 bp, Artificial sequence
  Synthetic oligonucleotide
gaggagccaggcatat

SEQ ID NO: 1921 - DNA, 16 bp, Artificial sequence
  Synthetic oligonucleotide
caccaacgaagtcccc

SEQ ID NO: 1922 - DNA, 16 bp, Artificial sequence
  Synthetic oligonucleotide
gctggcagtcaccaaa

SEQ ID NO: 1923 - DNA, 16 bp, Artificial sequence
  Synthetic oligonucleotide
gcccacaccattgagc

SEQ ID NO: 1924 - DNA, 16 bp, Artificial sequence
  Synthetic oligonucleotide
agtgagatgccctggt

SEQ ID NO: 1925 - DNA, 16 bp, Artificial sequence
  Synthetic oligonucleotide
cactggcagttagacc

SEQ ID NO: 1926 - DNA, 16 bp, Artificial sequence
  Synthetic oligonucleotide
actctggccactagta

SEQ ID NO: 1927 - DNA, 16 bp, Artificial sequence
  Synthetic oligonucleotide
ggtagggtggccacat

SEQ ID NO: 1928 - DNA, 16 bp, Artificial sequence
  Synthetic oligonucleotide
gagccatgtctaggca

SEQ ID NO: 1929 - DNA, 16 bp, Artificial sequence
  Synthetic oligonucleotide
cagactgaaacccacc

SEQ ID NO: 1930 - DNA, 16 bp, Artificial sequence
  Synthetic oligonucleotide
tatggtccagccacca

SEQ ID NO: 1931 - DNA, 16 bp, Artificial sequence
  Synthetic oligonucleotide
tacctcctctgttggt

SEQ ID NO: 1932 - DNA, 16 bp, Artificial sequence
  Synthetic oligonucleotide
acacctcagtcatgat

SEQ ID NO: 1933 - DNA, 16 bp, Artificial sequence
  Synthetic oligonucleotide
aacaggcttcaagagg

SEQ ID NO: 1934 - DNA, 16 bp, Artificial sequence
  Synthetic oligonucleotide
gtactactggccatgt

SEQ ID NO: 1935 - DNA, 16 bp, Artificial sequence
  Synthetic oligonucleotide
ctgcaggcggttgcta

SEQ ID NO: 1936 - DNA, 16 bp, Artificial sequence
  Synthetic oligonucleotide
gtctgttgccaagagc

SEQ ID NO: 1937 - DNA, 16 bp, Artificial sequence
  Synthetic oligonucleotide
ccctgggtcacttaag

SEQ ID NO: 1938 - DNA, 16 bp, Artificial sequence
  Synthetic oligonucleotide
cctgtccttgcttgca

SEQ ID NO: 1939 - DNA, 16 bp, Artificial sequence
  Synthetic oligonucleotide
gcccagcttatcctaa

SEQ ID NO: 1940 - DNA, 16 bp, Artificial sequence
  Synthetic oligonucleotide
agtagagcctttgcct

SEQ ID NO: 1941 - DNA, 16 bp, Artificial sequence
  Synthetic oligonucleotide
ctgtctcttggcccat

SEQ ID NO: 1942 - DNA, 16 bp, Artificial sequence
  Synthetic oligonucleotide
ggcccaaatcttgagt

SEQ ID NO: 1943 - DNA, 16 bp, Artificial sequence
  Synthetic oligonucleotide
gcttgttacagcacta

SEQ ID NO: 1944 - DNA, 16 bp, Artificial sequence
  Synthetic oligonucleotide
actttggcccagagat

SEQ ID NO: 1945 - DNA, 16 bp, Artificial sequence
  Synthetic oligonucleotide
gcagtcaggtcagctg

SEQ ID NO: 1946 - DNA, 16 bp, Artificial sequence
  Synthetic oligonucleotide
gccttgtcctactacc

SEQ ID NO: 1947 - DNA, 16 bp, Artificial sequence
  Synthetic oligonucleotide
ggctctgctattggcc

SEQ ID NO: 1948 - DNA, 16 bp, Artificial sequence
  Synthetic oligonucleotide
cttatagagccttgcc

SEQ ID NO: 1949 - DNA, 16 bp, Artificial sequence
  Synthetic oligonucleotide
ggaagggcccaaatat

SEQ ID NO: 1950 - DNA, 16 bp, Artificial sequence
  Synthetic oligonucleotide
gatctactcctactgc

SEQ ID NO: 1951 - DNA, 16 bp, Artificial sequence
  Synthetic oligonucleotide
gtcagcctgtgtctga

SEQ ID NO: 1952 - DNA, 16 bp, Artificial sequence
  Synthetic oligonucleotide
agcttcctccttacac

SEQ ID NO: 1953 - DNA, 16 bp, Artificial sequence
  Synthetic oligonucleotide
ctgctaagcccctacc

SEQ ID NO: 1954 - DNA, 16 bp, Artificial sequence
  Synthetic oligonucleotide
agaggtcaggtgcata

SEQ ID NO: 1955 - DNA, 16 bp, Artificial sequence
  Synthetic oligonucleotide
ttcagcctggttggga

SEQ ID NO: 1956 - DNA, 16 bp, Artificial sequence
  Synthetic oligonucleotide
gattgattgagctcct

SEQ ID NO: 1957 - DNA, 16 bp, Artificial sequence
  Synthetic oligonucleotide
atggactccctaggct

SEQ ID NO: 1958 - DNA, 16 bp, Artificial sequence
  Synthetic oligonucleotide
tactcaagggcccctc

SEQ ID NO: 1959 - DNA, 16 bp, Artificial sequence
  Synthetic oligonucleotide
ggcatatgtagcttgc

SEQ ID NO: 1960 - DNA, 16 bp, Artificial sequence
  Synthetic oligonucleotide
gagcttagatctgtgc

SEQ ID NO: 1961 - DNA, 16 bp, Artificial sequence
  Synthetic oligonucleotide
atgctcacggctgtgt

SEQ ID NO: 1962 - DNA, 16 bp, Artificial sequence
  Synthetic oligonucleotide
attgaaaggcccatca

SEQ ID NO: 1963 - DNA, 16 bp, Artificial sequence
  Synthetic oligonucleotide
caacccagtttgccgg

SEQ ID NO: 1964 - DNA, 16 bp, Artificial sequence
  Synthetic oligonucleotide
cagctattccctgttt

SEQ ID NO: 1965 - DNA, 16 bp, Artificial sequence
  Synthetic oligonucleotide
gctgtgtcacacttcc

SEQ ID NO: 1966 - DNA, 16 bp, Artificial sequence
  Synthetic oligonucleotide
gtccaaggatcacagc

SEQ ID NO: 1967 - DNA, 16 bp, Artificial sequence
  Synthetic oligonucleotide
gctaccactagagcct

SEQ ID NO: 1968 - DNA, 16 bp, Artificial sequence
  Synthetic oligonucleotide
gtttcagggcttatgt

SEQ ID NO: 1969 - DNA, 16 bp, Artificial sequence
  Synthetic oligonucleotide
tcccacacctattgaa

SEQ ID NO: 1970 - DNA, 16 bp, Artificial sequence
  Synthetic oligonucleotide
actgactagagagtcc

SEQ ID NO: 1971 - DNA, 16 bp, Artificial sequence
  Synthetic oligonucleotide
tccaaggctgatgtcc

SEQ ID NO: 1972 - DNA, 16 bp, Artificial sequence
  Synthetic oligonucleotide
tcccatggtggacatg

SEQ ID NO: 1973 - DNA, 16 bp, Artificial sequence
  Synthetic oligonucleotide
agtagctggcagaagg

SEQ ID NO: 1974 - DNA, 16 bp, Artificial sequence
  Synthetic oligonucleotide
ctgggagtgactacta

SEQ ID NO: 1975 - DNA, 16 bp, Artificial sequence
  Synthetic oligonucleotide
tggtatagctactggg

SEQ ID NO: 1976 - DNA, 16 bp, Artificial sequence
  Synthetic oligonucleotide
ctgtggtttggcaggt

SEQ ID NO: 1977 - DNA, 16 bp, Artificial sequence
  Synthetic oligonucleotide
gttctcacctgaacta

SEQ ID NO: 1978 - DNA, 16 bp, Artificial sequence
  Synthetic oligonucleotide
ataggctactggcagg

SEQ ID NO: 1979 - DNA, 16 bp, Artificial sequence
  Synthetic oligonucleotide
cccagctagctggagt

SEQ ID NO: 1980 - DNA, 16 bp, Artificial sequence
  Synthetic oligonucleotide
ggctggctctcaaagg

SEQ ID NO: 1981 - DNA, 16 bp, Artificial sequence
  Synthetic oligonucleotide
tggtgatactgtggca

SEQ ID NO: 1982 - DNA, 16 bp, Artificial sequence
  Synthetic oligonucleotide
gctgattttggtgcca

SEQ ID NO: 1983 - DNA, 16 bp, Artificial sequence
  Synthetic oligonucleotide
gctaatcttgcctcga

SEQ ID NO: 1984 - DNA, 16 bp, Artificial sequence
  Synthetic oligonucleotide
cactggtggctttcaa

SEQ ID NO: 1985 - DNA, 16 bp, Artificial sequence
  Synthetic oligonucleotide
gtccccttcttaagca

SEQ ID NO: 1986 - DNA, 16 bp, Artificial sequence
  Synthetic oligonucleotide
gccaggccaactgtgg

SEQ ID NO: 1987 - DNA, 16 bp, Artificial sequence
  Synthetic oligonucleotide
ggcccgttatggtgga

SEQ ID NO: 1988 - DNA, 16 bp, Artificial sequence
  Synthetic oligonucleotide
cctaaagtccaactcc

SEQ ID NO: 1989 - DNA, 16 bp, Artificial sequence
  Synthetic oligonucleotide
ccctatccagccttca

SEQ ID NO: 1990 - DNA, 16 bp, Artificial sequence
  Synthetic oligonucleotide
aagcatggcctctggc

SEQ ID NO: 1991 - DNA, 16 bp, Artificial sequence
  Synthetic oligonucleotide
taccctgcaccctcct

SEQ ID NO: 1992 - DNA, 16 bp, Artificial sequence
  Synthetic oligonucleotide
tccttagtagaatgcc

SEQ ID NO: 1993 - DNA, 16 bp, Artificial sequence
  Synthetic oligonucleotide
ttagccctgggagcac

SEQ ID NO: 1994 - DNA, 16 bp, Artificial sequence
  Synthetic oligonucleotide
gctgggtcaggtagcg

SEQ ID NO: 1995 - DNA, 16 bp, Artificial sequence
  Synthetic oligonucleotide
gggaggctctcaatct

SEQ ID NO: 1996 - DNA, 16 bp, Artificial sequence
  Synthetic oligonucleotide
gtaagtgcagaatgcc

SEQ ID NO: 1997 - DNA, 16 bp, Artificial sequence
  Synthetic oligonucleotide
tgccgaggcaggcacc

SEQ ID NO: 1998 - DNA, 16 bp, Artificial sequence
  Synthetic oligonucleotide
tccgtgtctaggaggt

SEQ ID NO: 1999 - DNA, 16 bp, Artificial sequence
  Synthetic oligonucleotide
gtctccctgcattgga

SEQ ID NO: 2000 - DNA, 16 bp, Artificial sequence
  Synthetic oligonucleotide
ccatatcactctcctc

SEQ ID NO: 2001 - DNA, 16 bp, Artificial sequence
  Synthetic oligonucleotide
cgaacaccttgagcca

SEQ ID NO: 2002 - DNA, 16 bp, Artificial sequence
  Synthetic oligonucleotide
ggcccagcttaagagg

SEQ ID NO: 2003 - DNA, 16 bp, Artificial sequence
  Synthetic oligonucleotide
ctgatactcctaatcc

SEQ ID NO: 2004 - DNA, 16 bp, Artificial sequence
  Synthetic oligonucleotide
gcctgtagggctgtgc

SEQ ID NO: 2005 - DNA, 16 bp, Artificial sequence
  Synthetic oligonucleotide
tgccctttctccctac

SEQ ID NO: 2006 - DNA, 16 bp, Artificial sequence
  Synthetic oligonucleotide
agtgcatgtcagtacc

SEQ ID NO: 2007 - DNA, 16 bp, Artificial sequence
  Synthetic oligonucleotide
tgctcctcagctgttg

SEQ ID NO: 2008 - DNA, 16 bp, Artificial sequence
  Synthetic oligonucleotide
gtttgggaccatccct

SEQ ID NO: 2009 - DNA, 16 bp, Artificial sequence
  Synthetic oligonucleotide
agtgctctctagggtc

SEQ ID NO: 2010 - DNA, 16 bp, Artificial sequence
  Synthetic oligonucleotide
tacagagaatcacccc

SEQ ID NO: 2011 - DNA, 16 bp, Artificial sequence
  Synthetic oligonucleotide
gtccaagtaaggtgct

SEQ ID NO: 2012 - DNA, 16 bp, Artificial sequence
  Synthetic oligonucleotide
gaccttgcaggcttcc

SEQ ID NO: 2013 - DNA, 16 bp, Artificial sequence
  Synthetic oligonucleotide
gggcaaaggatcctct

SEQ ID NO: 2014 - DNA, 16 bp, Artificial sequence
  Synthetic oligonucleotide
cccattctgctatccc

SEQ ID NO: 2015 - DNA, 16 bp, Artificial sequence
  Synthetic oligonucleotide
gctgactaggagggct

SEQ ID NO: 2016 - DNA, 16 bp, Artificial sequence
  Synthetic oligonucleotide
cctgtgaggtagtacc

SEQ ID NO: 2017 - DNA, 16 bp, Artificial sequence
  Synthetic oligonucleotide
gtccccctccagtcta

SEQ ID NO: 2018 - DNA, 16 bp, Artificial sequence
  Synthetic oligonucleotide
gaggactcaattcctc

SEQ ID NO: 2019 - DNA, 16 bp, Artificial sequence
  Synthetic oligonucleotide
gacaaggtccttttgg

SEQ ID NO: 2020 - DNA, 16 bp, Artificial sequence
  Synthetic oligonucleotide
gctcttgtgtgcaccc

SEQ ID NO: 2021 - DNA, 16 bp, Artificial sequence
  Synthetic oligonucleotide
tcaccgcctgcaccac

SEQ ID NO: 2022 - DNA, 16 bp, Artificial sequence
  Synthetic oligonucleotide
ggttgcactgtgcaat

SEQ ID NO: 2023 - DNA, 16 bp, Artificial sequence
  Synthetic oligonucleotide
ttccacaggcctccat

SEQ ID NO: 2024 - DNA, 16 bp, Artificial sequence
  Synthetic oligonucleotide
gctgagttccatatgc

SEQ ID NO: 2025 - DNA, 16 bp, Artificial sequence
  Synthetic oligonucleotide
gaaccgccacctcagg

SEQ ID NO: 2026 - DNA, 16 bp, Artificial sequence
  Synthetic oligonucleotide
gctcacggttggagac

SEQ ID NO: 2027 - DNA, 16 bp, Artificial sequence
  Synthetic oligonucleotide
tgggctcccatgttca

SEQ ID NO: 2028 - DNA, 16 bp, Artificial sequence
  Synthetic oligonucleotide
tcactctaccaacctc

SEQ ID NO: 2029 - DNA, 16 bp, Artificial sequence
  Synthetic oligonucleotide
tccttgcttacagatg

SEQ ID NO: 2030 - DNA, 16 bp, Artificial sequence
  Synthetic oligonucleotide
tgatgctagcattacc

SEQ ID NO: 2031 - DNA, 16 bp, Artificial sequence
  Synthetic oligonucleotide
tgggtaactggctagt

SEQ ID NO: 2032 - DNA, 16 bp, Artificial sequence
  Synthetic oligonucleotide
aaccattcctcaccaa

SEQ ID NO: 2033 - DNA, 16 bp, Artificial sequence
  Synthetic oligonucleotide
gccctgaacagttgat

SEQ ID NO: 2034 - DNA, 16 bp, Artificial sequence
  Synthetic oligonucleotide
ggctcctatcatacct

SEQ ID NO: 2035 - DNA, 16 bp, Artificial sequence
  Synthetic oligonucleotide
taggtctcacaaccct

SEQ ID NO: 2036 - DNA, 16 bp, Artificial sequence
  Synthetic oligonucleotide
gtgcattagtcttcca

SEQ ID NO: 2037 - DNA, 16 bp, Artificial sequence
  Synthetic oligonucleotide
caaaagccaggttagc

SEQ ID NO: 2038 - DNA, 16 bp, Artificial sequence
  Synthetic oligonucleotide
ctgctgttgactacct

SEQ ID NO: 2039 - DNA, 16 bp, Artificial sequence
  Synthetic oligonucleotide
gtacctgccagctact

SEQ ID NO: 2040 - DNA, 16 bp, Artificial sequence
  Synthetic oligonucleotide
cctacctttgctgttt

SEQ ID NO: 2041 - DNA, 16 bp, Artificial sequence
  Synthetic oligonucleotide
agtcaccagcctaagc

SEQ ID NO: 2042 - DNA, 16 bp, Artificial sequence
  Synthetic oligonucleotide
aggcaacctgggagtg

SEQ ID NO: 2043 - DNA, 16 bp, Artificial sequence
  Synthetic oligonucleotide
tggccttcacaatggc

SEQ ID NO: 2044 - DNA, 16 bp, Artificial sequence
  Synthetic oligonucleotide
ggtgaagtgggttgga

SEQ ID NO: 2045 - DNA, 16 bp, Artificial sequence
  Synthetic oligonucleotide
gctggttgtctgctgc

SEQ ID NO: 2046 - DNA, 16 bp, Artificial sequence
  Synthetic oligonucleotide
agtttgtgacccctgc

SEQ ID NO: 2047 - DNA, 16 bp, Artificial sequence
  Synthetic oligonucleotide
ccactcagtgtgaatg

SEQ ID NO: 2048 - DNA, 16 bp, Artificial sequence
  Synthetic oligonucleotide
ctggcctcagggcaat

SEQ ID NO: 2049 - DNA, 16 bp, Artificial sequence
  Synthetic oligonucleotide
gtagacttgggtaggt

SEQ ID NO: 2050 - DNA, 16 bp, Artificial sequence
  Synthetic oligonucleotide
tggtgctaagctctcc

SEQ ID NO: 2051 - DNA, 16 bp, Artificial sequence
  Synthetic oligonucleotide
catgctcaagctggaa

SEQ ID NO: 2052 - DNA, 16 bp, Artificial sequence
  Synthetic oligonucleotide
aaggtcaacagcagct

SEQ ID NO: 2053 - DNA, 16 bp, Artificial sequence
  Synthetic oligonucleotide
caaggtcaacagcagc

SEQ ID NO: 2054 - DNA, 16 bp, Artificial sequence
  Synthetic oligonucleotide
ccaaggtcaacagcag

SEQ ID NO: 2055 - DNA, 16 bp, Artificial sequence
  Synthetic oligonucleotide
gccaaggtcaacagca

SEQ ID NO: 2056 - DNA, 16 bp, Artificial sequence
  Synthetic oligonucleotide
tctcacacgcacttca

SEQ ID NO: 2057 - DNA, 16 bp, Artificial sequence
  Synthetic oligonucleotide
atctcacacgcacttc

SEQ ID NO: 2058 - DNA, 16 bp, Artificial sequence
  Synthetic oligonucleotide
gatctcacacgcactt

SEQ ID NO: 2059 - DNA, 16 bp, Artificial sequence
  Synthetic oligonucleotide
ctttcatgaatcaagc

SEQ ID NO: 2060 - DNA, 16 bp, Artificial sequence
  Synthetic oligonucleotide
tctttcatgaatcaag

SEQ ID NO: 2061 - DNA, 16 bp, Artificial sequence
  Synthetic oligonucleotide
gtctttcatgaatcaa

SEQ ID NO: 2062 - DNA, 16 bp, Artificial sequence
  Synthetic oligonucleotide
ggtctttcatgaatca

SEQ ID NO: 2063 - DNA, 16 bp, Artificial sequence
  Synthetic oligonucleotide
atggtctttcatgaat

SEQ ID NO: 2064 - DNA, 16 bp, Artificial sequence
  Synthetic oligonucleotide
gatggtctttcatgaa

SEQ ID NO: 2065 - DNA, 16 bp, Artificial sequence
  Synthetic oligonucleotide
tgatggtctttcatga

SEQ ID NO: 2066 - DNA, 16 bp, Artificial sequence
  Synthetic oligonucleotide
tatatcaatattctcc

SEQ ID NO: 2067 - DNA, 16 bp, Artificial sequence
  Synthetic oligonucleotide
ttatatcaatattctc

SEQ ID NO: 2068 - DNA, 16 bp, Artificial sequence
  Synthetic oligonucleotide
gttatatcaatattct

SEQ ID NO: 2069 - DNA, 16 bp, Artificial sequence
  Synthetic oligonucleotide
tttctttagcaatagt

SEQ ID NO: 2070 - DNA, 16 bp, Artificial sequence
  Synthetic oligonucleotide
ctttctttagcaatag

SEQ ID NO: 2071 - DNA, 16 bp, Artificial sequence
  Synthetic oligonucleotide
gctttctttagcaata

SEQ ID NO: 2072 - DNA, 16 bp, Artificial sequence
  Synthetic oligonucleotide
ctccattagggttctg

SEQ ID NO: 2073 - DNA, 16 bp, Artificial sequence
  Synthetic oligonucleotide
tctccattagggttct

SEQ ID NO: 2074 - DNA, 16 bp, Artificial sequence
  Synthetic oligonucleotide
ttctccattagggttc

SEQ ID NO: 2075 - DNA, 16 bp, Artificial sequence
  Synthetic oligonucleotide
gttctccattagggtt

SEQ ID NO: 2076 - DNA, 16 bp, Artificial sequence
  Synthetic oligonucleotide
aggttggcagacagac

SEQ ID NO: 2077 - DNA, 16 bp, Artificial sequence
  Synthetic oligonucleotide
caggttggcagacaga

SEQ ID NO: 2078 - DNA, 16 bp, Artificial sequence
  Synthetic oligonucleotide
gcaggttggcagacag

SEQ ID NO: 2079 - DNA, 16 bp, Artificial sequence
  Synthetic oligonucleotide
cttcttgtgagctggc

SEQ ID NO: 2080 - DNA, 16 bp, Artificial sequence
  Synthetic oligonucleotide
tcttcttgtgagctgg

SEQ ID NO: 2081 - DNA, 16 bp, Artificial sequence
  Synthetic oligonucleotide
gtcttcttgtgagctg

SEQ ID NO: 2082 - DNA, 16 bp, Artificial sequence
  Synthetic oligonucleotide
agtcttcttgtgagct

SEQ ID NO: 2083 - DNA, 16 bp, Artificial sequence
  Synthetic oligonucleotide
tcttccactcacatcc

SEQ ID NO: 2084 - DNA, 16 bp, Artificial sequence
  Synthetic oligonucleotide
ctcttccactcacatc

SEQ ID NO: 2085 - DNA, 16 bp, Artificial sequence
  Synthetic oligonucleotide
tctcttccactcacat

SEQ ID NO: 2086 - DNA, 16 bp, Artificial sequence
  Synthetic oligonucleotide
gtctcttccactcaca

SEQ ID NO: 2087 - DNA, 16 bp, Artificial sequence
  Synthetic oligonucleotide
atagattttgacttcc

SEQ ID NO: 2088 - DNA, 16 bp, Artificial sequence
  Synthetic oligonucleotide
catagattttgacttc

SEQ ID NO: 2089 - DNA, 16 bp, Artificial sequence
  Synthetic oligonucleotide
gcatagattttgactt

SEQ ID NO: 2090 - DNA, 16 bp, Artificial sequence
  Synthetic oligonucleotide
aaatgtcaacagtgca

SEQ ID NO: 2091 - DNA, 16 bp, Artificial sequence
  Synthetic oligonucleotide
catgactatgttctgg

SEQ ID NO: 2092 - DNA, 16 bp, Artificial sequence
  Synthetic oligonucleotide
acatgactatgttctg

SEQ ID NO: 2093 - DNA, 16 bp, Artificial sequence
  Synthetic oligonucleotide
cacatgactatgttct

SEQ ID NO: 2094 - DNA, 16 bp, Artificial sequence
  Synthetic oligonucleotide
gaattctgagctctgg

SEQ ID NO: 2095 - DNA, 16 bp, Artificial sequence
  Synthetic oligonucleotide
tgaattctgagctctg

SEQ ID NO: 2096 - DNA, 16 bp, Artificial sequence
  Synthetic oligonucleotide
ctgaattctgagctct

SEQ ID NO: 2097 - DNA, 16 bp, Artificial sequence
  Synthetic oligonucleotide
cctgaattctgagctc

SEQ ID NO: 2098 - DNA, 16 bp, Artificial sequence
  Synthetic oligonucleotide
gcctgaattctgagct

SEQ ID NO: 2099 - DNA, 16 bp, Artificial sequence
  Synthetic oligonucleotide
agcctgaattctgagc

SEQ ID NO: 2100 - DNA, 16 bp, Artificial sequence
  Synthetic oligonucleotide
atattgtaattcttgg

SEQ ID NO: 2101 - DNA, 16 bp, Artificial sequence
  Synthetic oligonucleotide
gatattgtaattcttg

SEQ ID NO: 2102 - DNA, 16 bp, Artificial sequence
  Synthetic oligonucleotide
tgatattgtaattctt

SEQ ID NO: 2103 - DNA, 16 bp, Artificial sequence
  Synthetic oligonucleotide
ctgatattgtaattct

SEQ ID NO: 2104 - DNA, 16 bp, Artificial sequence
  Synthetic oligonucleotide
cctgatattgtaattc

SEQ ID NO: 2105 - DNA, 16 bp, Artificial sequence
  Synthetic oligonucleotide
gcctgatattgtaatt

SEQ ID NO: 2106 - DNA, 16 bp, Artificial sequence
  Synthetic oligonucleotide
tgcctgatattgtaat

SEQ ID NO: 2107 - DNA, 16 bp, Artificial sequence
  Synthetic oligonucleotide
attatgtgctttgcct

SEQ ID NO: 2108 - DNA, 16 bp, Artificial sequence
  Synthetic oligonucleotide
aattatgtgctttgcc

SEQ ID NO: 2109 - DNA, 16 bp, Artificial sequence
  Synthetic oligonucleotide
caattatgtgctttgc

SEQ ID NO: 2110 - DNA, 16 bp, Artificial sequence
  Synthetic oligonucleotide
tcaattatgtgctttg

SEQ ID NO: 2111 - DNA, 16 bp, Artificial sequence
  Synthetic oligonucleotide
gtcaattatgtgcttt

SEQ ID NO: 2112 - DNA, 16 bp, Artificial sequence
  Synthetic oligonucleotide
gccatcaccaaacacc

SEQ ID NO: 2113 - DNA, 16 bp, Artificial sequence
  Synthetic oligonucleotide
tgccatcaccaaacac

SEQ ID NO: 2114 - DNA, 16 bp, Artificial sequence
  Synthetic oligonucleotide
ttgccatcaccaaaca

SEQ ID NO: 2115 - DNA, 16 bp, Artificial sequence
  Synthetic oligonucleotide
tggtgactctgcctga

SEQ ID NO: 2116 - DNA, 16 bp, Artificial sequence
  Synthetic oligonucleotide
ctggtgactctgcctg

SEQ ID NO: 2117 - DNA, 16 bp, Artificial sequence
  Synthetic oligonucleotide
gctggtgactctgcct

SEQ ID NO: 2118 - DNA, 16 bp, Artificial sequence
  Synthetic oligonucleotide
tgctggtgactctgcc

SEQ ID NO: 2119 - DNA, 16 bp, Artificial sequence
  Synthetic oligonucleotide
ctgctggtgactctgc

SEQ ID NO: 2120 - DNA, 16 bp, Artificial sequence
  Synthetic oligonucleotide
agtagtcaatattatt

SEQ ID NO: 2121 - DNA, 16 bp, Artificial sequence
  Synthetic oligonucleotide
cagtagtcaatattat

SEQ ID NO: 2122 - DNA, 16 bp, Artificial sequence
  Synthetic oligonucleotide
ccagtagtcaatatta

SEQ ID NO: 2123 - DNA, 16 bp, Artificial sequence
  Synthetic oligonucleotide
cctttgggtgaatagc

SEQ ID NO: 2124 - DNA, 16 bp, Artificial sequence
  Synthetic oligonucleotide
acctttgggtgaatag

SEQ ID NO: 2125 - DNA, 16 bp, Artificial sequence
  Synthetic oligonucleotide
cacctttgggtgaata

SEQ ID NO: 2126 - DNA, 16 bp, Artificial sequence
  Synthetic oligonucleotide
caacttgaggacaata

SEQ ID NO: 2127 - DNA, 16 bp, Artificial sequence
  Synthetic oligonucleotide
ctcaacttgaggacaa

SEQ ID NO: 2128 - DNA, 16 bp, Artificial sequence
  Synthetic oligonucleotide
caggaagaaaggaacc

SEQ ID NO: 2129 - DNA, 16 bp, Artificial sequence
  Synthetic oligonucleotide
ccaggaagaaaggaac

SEQ ID NO: 2130 - DNA, 16 bp, Artificial sequence
  Synthetic oligonucleotide
accaggaagaaaggaa

SEQ ID NO: 2131 - DNA, 16 bp, Artificial sequence
  Synthetic oligonucleotide
tgcagtcatgtacaca

SEQ ID NO: 2132 - DNA, 16 bp, Artificial sequence
  Synthetic oligonucleotide
ctgcagtcatgtacac

SEQ ID NO: 2133 - DNA, 16 bp, Artificial sequence
  Synthetic oligonucleotide
tctgcagtcatgtaca

SEQ ID NO: 2134 - DNA, 16 bp, Artificial sequence
  Synthetic oligonucleotide
tggtttgtcaatcctt

SEQ ID NO: 2135 - DNA, 16 bp, Artificial sequence
  Synthetic oligonucleotide
cttggtttgtcaatcc

SEQ ID NO: 2136 - DNA, 16 bp, Artificial sequence
  Synthetic oligonucleotide
gctacaatgcacagga

SEQ ID NO: 2137 - DNA, 16 bp, Artificial sequence
  Synthetic oligonucleotide
tgctacaatgcacagg

SEQ ID NO: 2138 - DNA, 16 bp, Artificial sequence
  Synthetic oligonucleotide
gatatttattgctgta

SEQ ID NO: 2139 - DNA, 16 bp, Artificial sequence
  Synthetic oligonucleotide
tgatatttattgctgt

SEQ ID NO: 2140 - DNA, 16 bp, Artificial sequence
  Synthetic oligonucleotide
ctgatatttattgctg

SEQ ID NO: 2141 - DNA, 16 bp, Artificial sequence
  Synthetic oligonucleotide
agggtctttacaaagt

SEQ ID NO: 2142 - DNA, 16 bp, Artificial sequence
  Synthetic oligonucleotide
cagggtctttacaaag

SEQ ID NO: 2143 - DNA, 16 bp, Artificial sequence
  Synthetic oligonucleotide
ccagggtctttacaaa

SEQ ID NO: 2144 - DNA, 16 bp, Artificial sequence
  Synthetic oligonucleotide
ttctgcagtatcctag

SEQ ID NO: 2145 - DNA, 16 bp, Artificial sequence
  Synthetic oligonucleotide
tttctgcagtatccta

SEQ ID NO: 2146 - DNA, 16 bp, Artificial sequence
  Synthetic oligonucleotide
gtttctgcagtatcct

SEQ ID NO: 2147 - DNA, 16 bp, Artificial sequence
  Synthetic oligonucleotide
agtttctgcagtatcc

SEQ ID NO: 2148 - DNA, 16 bp, Artificial sequence
  Synthetic oligonucleotide
cagtttctgcagtatc

SEQ ID NO: 2149 - DNA, 16 bp, Artificial sequence
  Synthetic oligonucleotide
caaattccagtcctag

SEQ ID NO: 2150 - DNA, 16 bp, Artificial sequence
  Synthetic oligonucleotide
ccaaattccagtccta

SEQ ID NO: 2151 - DNA, 16 bp, Artificial sequence
  Synthetic oligonucleotide
tccaaattccagtcct

SEQ ID NO: 2152 - DNA, 16 bp, Artificial sequence
  Synthetic oligonucleotide
acccatttcatccatt

SEQ ID NO: 2153 - DNA, 16 bp, Artificial sequence
  Synthetic oligonucleotide
aacccatttcatccat

SEQ ID NO: 2154 - DNA, 16 bp, Artificial sequence
  Synthetic oligonucleotide
gaacccatttcatcca

SEQ ID NO: 2155 - DNA, 16 bp, Artificial sequence
  Synthetic oligonucleotide
ggaacccatttcatcc

SEQ ID NO: 2156 - DNA, 16 bp, Artificial sequence
  Synthetic oligonucleotide
aggaacccatttcatc

SEQ ID NO: 2157 - DNA, 16 bp, Artificial sequence
  Synthetic oligonucleotide
gcttcatgtctttcta

SEQ ID NO: 2158 - DNA, 16 bp, Artificial sequence
  Synthetic oligonucleotide
tgcttcatgtctttct

SEQ ID NO: 2159 - DNA, 16 bp, Artificial sequence
  Synthetic oligonucleotide
gtgcttcatgtctttc

SEQ ID NO: 2160 - DNA, 16 bp, Artificial sequence
  Synthetic oligonucleotide
tgagcttagcagtcac

SEQ ID NO: 2161 - DNA, 16 bp, Artificial sequence
  Synthetic oligonucleotide
atgagcttagcagtca

SEQ ID NO: 2162 - DNA, 16 bp, Artificial sequence
  Synthetic oligonucleotide
catgagcttagcagtc

SEQ ID NO: 2163 - DNA, 16 bp, Artificial sequence
  Synthetic oligonucleotide
tacagacatagctcta

SEQ ID NO: 2164 - DNA, 16 bp, Artificial sequence
  Synthetic oligonucleotide
atacagacatagctct

SEQ ID NO: 2165 - DNA, 16 bp, Artificial sequence
  Synthetic oligonucleotide
gatacagacatagctc

SEQ ID NO: 2166 - DNA, 16 bp, Artificial sequence
  Synthetic oligonucleotide
ggatacagacatagct

SEQ ID NO: 2167 - DNA, 16 bp, Artificial sequence
  Synthetic oligonucleotide
tgtggctttaattcac

SEQ ID NO: 2168 - DNA, 16 bp, Artificial sequence
  Synthetic oligonucleotide
atgtggctttaattca

SEQ ID NO: 2169 - DNA, 16 bp, Artificial sequence
  Synthetic oligonucleotide
tatgtggctttaattc

SEQ ID NO: 2170 - DNA, 16 bp, Artificial sequence
  Synthetic oligonucleotide
tgttcagttgcatcac

SEQ ID NO: 2171 - DNA, 16 bp, Artificial sequence
  Synthetic oligonucleotide
gtgttcagttgcatca

SEQ ID NO: 2172 - DNA, 16 bp, Artificial sequence
  Synthetic oligonucleotide
tgtgttcagttgcatc

SEQ ID NO: 2173 - DNA, 16 bp, Artificial sequence
  Synthetic oligonucleotide
catctggatgtgaggc

SEQ ID NO: 2174 - DNA, 16 bp, Artificial sequence
  Synthetic oligonucleotide
acatctggatgtgagg

SEQ ID NO: 2175 - DNA, 16 bp, Artificial sequence
  Synthetic oligonucleotide
cacatctggatgtgag

SEQ ID NO: 2176 - DNA, 16 bp, Artificial sequence
  Synthetic oligonucleotide
tcaggtaatttctgga

SEQ ID NO: 2177 - DNA, 16 bp, Artificial sequence
  Synthetic oligonucleotide
ctcaggtaatttctgg

SEQ ID NO: 2178 - DNA, 16 bp, Artificial sequence
  Synthetic oligonucleotide
tctcaggtaatttctg

SEQ ID NO: 2179 - DNA, 16 bp, Artificial sequence
  Synthetic oligonucleotide
tgcttatttacctggg

SEQ ID NO: 2180 - DNA, 16 bp, Artificial sequence
  Synthetic oligonucleotide
ttgcttatttacctgg

SEQ ID NO: 2181 - DNA, 16 bp, Artificial sequence
  Synthetic oligonucleotide
tttgcttatttacctg

SEQ ID NO: 2182 - DNA, 16 bp, Artificial sequence
  Synthetic oligonucleotide
ttttgcttatttacct

SEQ ID NO: 2183 - DNA, 16 bp, Artificial sequence
  Synthetic oligonucleotide
atgatgttactactac

SEQ ID NO: 2184 - DNA, 16 bp, Artificial sequence
  Synthetic oligonucleotide
aatgatgttactacta

SEQ ID NO: 2185 - DNA, 16 bp, Artificial sequence
  Synthetic oligonucleotide
caatgatgttactact

SEQ ID NO: 2186 - DNA, 16 bp, Artificial sequence
  Synthetic oligonucleotide
cccctagagcaatggt

SEQ ID NO: 2187 - DNA, 16 bp, Artificial sequence
  Synthetic oligonucleotide
ccccctagagcaatgg

SEQ ID NO: 2188 - DNA, 16 bp, Artificial sequence
  Synthetic oligonucleotide
tccccctagagcaatg

SEQ ID NO: 2189 - DNA, 16 bp, Artificial sequence
  Synthetic oligonucleotide
tcaattgcagatgctc

SEQ ID NO: 2190 - DNA, 16 bp, Artificial sequence
  Synthetic oligonucleotide
ctcaattgcagatgct

SEQ ID NO: 2191 - DNA, 16 bp, Artificial sequence
  Synthetic oligonucleotide
gctcaattgcagatgc

SEQ ID NO: 2192 - DNA, 16 bp, Artificial sequence
  Synthetic oligonucleotide
agctcaattgcagatg

SEQ ID NO: 2193 - DNA, 16 bp, Artificial sequence
  Synthetic oligonucleotide
gtatattcagtccaag

SEQ ID NO: 2194 - DNA, 16 bp, Artificial sequence
  Synthetic oligonucleotide
agtatattcagtccaa

SEQ ID NO: 2195 - DNA, 16 bp, Artificial sequence
  Synthetic oligonucleotide
cagtatattcagtcca

SEQ ID NO: 2196 - DNA, 16 bp, Artificial sequence
  Synthetic oligonucleotide
acctccgagcttcgcc

SEQ ID NO: 2197 - DNA, 16 bp, Artificial sequence
  Synthetic oligonucleotide
gtaggacctccgagct

SEQ ID NO: 2198 - DNA, 16 bp, Artificial sequence
  Synthetic oligonucleotide
acctgtaggacctccg

SEQ ID NO: 2199 - DNA, 16 bp, Artificial sequence
  Synthetic oligonucleotide
cagtgccaaggtcaac

SEQ ID NO: 2200 - DNA, 16 bp, Artificial sequence
  Synthetic oligonucleotide
acttgatcctgccagt

SEQ ID NO: 2201 - DNA, 16 bp, Artificial sequence
  Synthetic oligonucleotide
ctcgctcaggtgaacg

SEQ ID NO: 2202 - DNA, 16 bp, Artificial sequence
  Synthetic oligonucleotide
agtctctcgctcaggt

SEQ ID NO: 2203 - DNA, 16 bp, Artificial sequence
  Synthetic oligonucleotide
ccttctggtatagaac

SEQ ID NO: 2204 - DNA, 16 bp, Artificial sequence
  Synthetic oligonucleotide
gctagttagcttgata

SEQ ID NO: 2205 - DNA, 16 bp, Artificial sequence
  Synthetic oligonucleotide
tctggttgcactattt

SEQ ID NO: 2206 - DNA, 16 bp, Artificial sequence
  Synthetic oligonucleotide
ggatctggttgcacta

SEQ ID NO: 2207 - DNA, 16 bp, Artificial sequence
  Synthetic oligonucleotide
ggtggatctggttgca

SEQ ID NO: 2208 - DNA, 16 bp, Artificial sequence
  Synthetic oligonucleotide
gcaatgggtggatctg

SEQ ID NO: 2209 - DNA, 16 bp, Artificial sequence
  Synthetic oligonucleotide
cagttgagggcaatgg

SEQ ID NO: 2210 - DNA, 16 bp, Artificial sequence
  Synthetic oligonucleotide
agtccagttgagggca

SEQ ID NO: 2211 - DNA, 16 bp, Artificial sequence
  Synthetic oligonucleotide
gtaaagtccagttgag

SEQ ID NO: 2212 - DNA, 16 bp, Artificial sequence
  Synthetic oligonucleotide
gttcagtaaagtccag

SEQ ID NO: 2213 - DNA, 16 bp, Artificial sequence
  Synthetic oligonucleotide
ctgcatgaatcccagt

SEQ ID NO: 2214 - DNA, 16 bp, Artificial sequence
  Synthetic oligonucleotide
acatagagcacctcac

SEQ ID NO: 2215 - DNA, 16 bp, Artificial sequence
  Synthetic oligonucleotide
gttacatagagcacct

SEQ ID NO: 2216 - DNA, 16 bp, Artificial sequence
  Synthetic oligonucleotide
agtgttacatagagca

SEQ ID NO: 2217 - DNA, 16 bp, Artificial sequence
  Synthetic oligonucleotide
tccttgaggagatctg

SEQ ID NO: 2218 - DNA, 16 bp, Artificial sequence
  Synthetic oligonucleotide
gctatcatgaatggct

SEQ ID NO: 2219 - DNA, 16 bp, Artificial sequence
  Synthetic oligonucleotide
cgggtttatagctatc

SEQ ID NO: 2220 - DNA, 16 bp, Artificial sequence
  Synthetic oligonucleotide
atccttcacccctagg

SEQ ID NO: 2221 - DNA, 16 bp, Artificial sequence
  Synthetic oligonucleotide
gagtcgccatccttca

SEQ ID NO: 2222 - DNA, 16 bp, Artificial sequence
  Synthetic oligonucleotide
tccagagtcgccatcc

SEQ ID NO: 2223 - DNA, 16 bp, Artificial sequence
  Synthetic oligonucleotide
ggctgagcaacctctg

SEQ ID NO: 2224 - DNA, 16 bp, Artificial sequence
  Synthetic oligonucleotide
ctgtggctgagcaacc

SEQ ID NO: 2225 - DNA, 16 bp, Artificial sequence
  Synthetic oligonucleotide
gataacactgggctgc

SEQ ID NO: 2226 - DNA, 16 bp, Artificial sequence
  Synthetic oligonucleotide
tgcttggataacactg

SEQ ID NO: 2227 - DNA, 16 bp, Artificial sequence
  Synthetic oligonucleotide
ctctgcttggataaca

SEQ ID NO: 2228 - DNA, 16 bp, Artificial sequence
  Synthetic oligonucleotide
gctgaatatgggcagc

SEQ ID NO: 2229 - DNA, 16 bp, Artificial sequence
  Synthetic oligonucleotide
cttggattgcttagct

SEQ ID NO: 2230 - DNA, 16 bp, Artificial sequence
  Synthetic oligonucleotide
cctgggcataaaagtc

SEQ ID NO: 2231 - DNA, 16 bp, Artificial sequence
  Synthetic oligonucleotide
accttgatgtgaggag

SEQ ID NO: 2232 - DNA, 16 bp, Artificial sequence
  Synthetic oligonucleotide
gattcaaccttgatgt

SEQ ID NO: 2233 - DNA, 16 bp, Artificial sequence
  Synthetic oligonucleotide
atgtgtgattcaacct

SEQ ID NO: 2234 - DNA, 16 bp, Artificial sequence
  Synthetic oligonucleotide
tgggacaggcatctca

SEQ ID NO: 2235 - DNA, 16 bp, Artificial sequence
  Synthetic oligonucleotide
tagtctgggacaggca

SEQ ID NO: 2236 - DNA, 16 bp, Artificial sequence
  Synthetic oligonucleotide
ggaggtatagtctggg

SEQ ID NO: 2237 - DNA, 16 bp, Artificial sequence
  Synthetic oligonucleotide
ggactgtactatatga

SEQ ID NO: 2238 - DNA, 16 bp, Artificial sequence
  Synthetic oligonucleotide
tcagttggtctgtgct

SEQ ID NO: 2239 - DNA, 16 bp, Artificial sequence
  Synthetic oligonucleotide
gctaaggcatgatttt

SEQ ID NO: 2240 - DNA, 16 bp, Artificial sequence
  Synthetic oligonucleotide
gccatgcttgaagtct

SEQ ID NO: 2241 - DNA, 16 bp, Artificial sequence
  Synthetic oligonucleotide
atagccatgcttgaag

SEQ ID NO: 2242 - DNA, 16 bp, Artificial sequence
  Synthetic oligonucleotide
acacagtgtgtagtgt

SEQ ID NO: 2243 - DNA, 16 bp, Artificial sequence
  Synthetic oligonucleotide
ctgcagtacacagtgt

SEQ ID NO: 2244 - DNA, 16 bp, Artificial sequence
  Synthetic oligonucleotide
accaactgcagtacac

SEQ ID NO: 2245 - DNA, 16 bp, Artificial sequence
  Synthetic oligonucleotide
tagactgtagttgcta

SEQ ID NO: 2246 - DNA, 16 bp, Artificial sequence
  Synthetic oligonucleotide
accagctttagactgt

SEQ ID NO: 2247 - DNA, 16 bp, Artificial sequence
  Synthetic oligonucleotide
gtaagttgatctgtgc

SEQ ID NO: 2248 - DNA, 16 bp, Artificial sequence
  Synthetic oligonucleotide
tacttcttttggtgcc

SEQ ID NO: 2249 - DNA, 16 bp, Artificial sequence
  Synthetic oligonucleotide
tcttgtaccttattcc

SEQ ID NO: 2250 - DNA, 16 bp, Artificial sequence
  Synthetic oligonucleotide
tggttataggctgtga

SEQ ID NO: 2251 - DNA, 16 bp, Artificial sequence
  Synthetic oligonucleotide
gtctggttataggctg

SEQ ID NO: 2252 - DNA, 16 bp, Artificial sequence
  Synthetic oligonucleotide
atgtgtctggttatag

SEQ ID NO: 2253 - DNA, 16 bp, Artificial sequence
  Synthetic oligonucleotide
gagtatgtgtctggtt

SEQ ID NO: 2254 - DNA, 16 bp, Artificial sequence
  Synthetic oligonucleotide
ggtctgcgataaatgg

SEQ ID NO: 2255 - DNA, 16 bp, Artificial sequence
  Synthetic oligonucleotide
gccagacacaactagt

SEQ ID NO: 2256 - DNA, 16 bp, Artificial sequence
  Synthetic oligonucleotide
accgccactgtagcag

SEQ ID NO: 2257 - DNA, 16 bp, Artificial sequence
  Synthetic oligonucleotide
ccgccaccgccactgt

SEQ ID NO: 2258 - DNA, 16 bp, Artificial sequence
  Synthetic oligonucleotide
gggcctccggcccgcg

SEQ ID NO: 2259 - DNA, 16 bp, Artificial sequence
  Synthetic oligonucleotide
agagcgcgggttcgcg

SEQ ID NO: 2260 - DNA, 16 bp, Artificial sequence
  Synthetic oligonucleotide
tactgaccccagttcc

SEQ ID NO: 2261 - DNA, 16 bp, Artificial sequence
  Synthetic oligonucleotide
actctactgaccccag

SEQ ID NO: 2262 - DNA, 16 bp, Artificial sequence
  Synthetic oligonucleotide
gtcactctactgaccc

SEQ ID NO: 2263 - DNA, 16 bp, Artificial sequence
  Synthetic oligonucleotide
ttcatgcggactggtg

SEQ ID NO: 2264 - DNA, 16 bp, Artificial sequence
  Synthetic oligonucleotide
gtgagcatggacccca

SEQ ID NO: 2265 - DNA, 16 bp, Artificial sequence
  Synthetic oligonucleotide
tgatatgtgagcatgg

SEQ ID NO: 2266 - DNA, 16 bp, Artificial sequence
  Synthetic oligonucleotide
aagttggtgagcttct

SEQ ID NO: 2267 - DNA, 16 bp, Artificial sequence
  Synthetic oligonucleotide
ccttcaagttggtgag

SEQ ID NO: 2268 - DNA, 16 bp, Artificial sequence
  Synthetic oligonucleotide
gtaagatccttttgcc

SEQ ID NO: 2269 - DNA, 16 bp, Artificial sequence
  Synthetic oligonucleotide
cagctgtgcaacttgc

SEQ ID NO: 2270 - DNA, 16 bp, Artificial sequence
  Synthetic oligonucleotide
gccttggtaggtaggg

SEQ ID NO: 2271 - DNA, 16 bp, Artificial sequence
  Synthetic oligonucleotide
agagccttggtaggta

SEQ ID NO: 2272 - DNA, 16 bp, Artificial sequence
  Synthetic oligonucleotide
cccgcacaaacgcgca

SEQ ID NO: 2273 - DNA, 16 bp, Artificial sequence
  Synthetic oligonucleotide
gtcttcaaggtcagtt

SEQ ID NO: 2274 - DNA, 16 bp, Artificial sequence
  Synthetic oligonucleotide
gcccagtgaattcagc

SEQ ID NO: 2275 - DNA, 16 bp, Artificial sequence
  Synthetic oligonucleotide
agatgcgcccagtgaa

SEQ ID NO: 2276 - DNA, 16 bp, Artificial sequence
  Synthetic oligonucleotide
gtaagatgcgcccagt

SEQ ID NO: 2277 - DNA, 16 bp, Artificial sequence
  Synthetic oligonucleotide
ccagaaggcacttgta

SEQ ID NO: 2278 - DNA, 16 bp, Artificial sequence
  Synthetic oligonucleotide
ggaagatttgcagaac

SEQ ID NO: 2279 - DNA, 16 bp, Artificial sequence
  Synthetic oligonucleotide
ccttggtcatggaaga

SEQ ID NO: 2280 - DNA, 16 bp, Artificial sequence
  Synthetic oligonucleotide
tgaccttggtcatgga

SEQ ID NO: 2281 - DNA, 16 bp, Artificial sequence
  Synthetic oligonucleotide
gaggtgaccttggtca

SEQ ID NO: 2282 - DNA, 16 bp, Artificial sequence
  Synthetic oligonucleotide
atccaaagaggtgacc

SEQ ID NO: 2283 - DNA, 16 bp, Artificial sequence
  Synthetic oligonucleotide
gccaatccaaagaggt

SEQ ID NO: 2284 - DNA, 16 bp, Artificial sequence
  Synthetic oligonucleotide
ggtctgccaatccaaa

SEQ ID NO: 2285 - DNA, 16 bp, Artificial sequence
  Synthetic oligonucleotide
ccctgggtctgccaat

SEQ ID NO: 2286 - DNA, 16 bp, Artificial sequence
  Synthetic oligonucleotide
gagatctcaacaaggg

SEQ ID NO: 2287 - DNA, 16 bp, Artificial sequence
  Synthetic oligonucleotide
cgcccatcactcttcc

SEQ ID NO: 2288 - DNA, 16 bp, Artificial sequence
  Synthetic oligonucleotide
cacctgtcgcccatca

SEQ ID NO: 2289 - DNA, 16 bp, Artificial sequence
  Synthetic oligonucleotide
catcacctgtcgccca

SEQ ID NO: 2290 - DNA, 16 bp, Artificial sequence
  Synthetic oligonucleotide
caccatcacctgtcgc

SEQ ID NO: 2291 - DNA, 16 bp, Artificial sequence
  Synthetic oligonucleotide
aatagttgtcaccatc

SEQ ID NO: 2292 - DNA, 16 bp, Artificial sequence
  Synthetic oligonucleotide
gccacctttcatgaga

SEQ ID NO: 2293 - DNA, 16 bp, Artificial sequence
  Synthetic oligonucleotide
ctcttggaagtaggta

SEQ ID NO: 2294 - DNA, 16 bp, Artificial sequence
  Synthetic oligonucleotide
gttctcttggaagtag

SEQ ID NO: 2295 - DNA, 16 bp, Artificial sequence
  Synthetic oligonucleotide
taaacaggttggtctg

SEQ ID NO: 2296 - DNA, 310001 bp, Macaca mulatta
  misc_feature (17323)..(17436): n is a, c, g, or t
  misc_feature (25984)..(26003): n is a, c, g, or t
  misc_feature (107240)..(107259): n is a, c, g, or t
  misc_feature (113595)..(113619): n is a, c, g, or t
  misc_feature (136036)..(136328): n is a, c, g, or t
  misc_feature (140788)..(140807): n is a, c, g, or t
  misc_feature (192868)..(193398): n is a, c, g, or t
  misc_feature (210347)..(210366): n is a, c, g, or t
  misc_feature (218041)..(218671): n is a, c, g, or t
  misc_feature (243838)..(243998): n is a, c, g, or t
  misc_feature (291980)..(292210): n is a, c, g, or t
  misc_feature (293097)..(293542): n is a, c, g, or t
tgtgattggcgtatgtttaaggagaaagaaccagagttcagatgtggacatgtcaagtttcagaggtctgttagacatccaaatggagatatccagttgctagcctggagctctgtggagagatctgggtttgagttataaatccaagagatagaagttttcaatcaatttgattatttattgggcactctatataaaccctacaaatactgggcactaacctagacattacaggtacagatattaagaatatatagtttctccctcagaaatctcttaattaatgagaaaagcagacatataacaaaaactgcaatatttaataaaagaagatataaaggcctataaaggtgctgatacacagagaattaactaataaattccaccctggggaatagtcaggaagagcttcagagagaaggtaaataattgattggaactttaaggcaaagaaggatttctctgggtggacaaagtaggatcttccaagtagagtggaaaccataagcaaatgcagtttcactcttcaaaaggtaaatgtgctctggaatgccttaacttgtaacaaattaatcaactcaatacctgctacattttccctcacaatttggaatatataaagaggcacatactaccatagaccaatacctggtcataaatgagattgagggacctttattcatgaagcttaaaaataaaggctgcccttcatgtcagttgcaggtttatatctagctctataatattaactgaggtgtctttttctatgttttctgtgcatgatgagtttttaaaaatcaaagacagagcagcaggcagagtagtctagtttcatggcacacagaatggaggatattgctgaacccagatttttaaaaaaggaagtcagttcttctttttttaagtatggccctgagctcatctcagagcataaacaatagaatttagaataccttttatgatgccgtctggcacctcctatactagatcaagattctctagctcagggaagaagggcaaaggatgagaaggcacagagaggatataaacagagattggtagtgccaagctctgaagaaggtccaacttggaaggtcatttcagacaggagtggagtcagcatttgaggactgtctggtctctactcctgccaggactgcactgtcagccagcttggcatgtatggaccaccgagcaggagtttttcttgactgtgccctaatcttttactttcccaagtttctctatatgggtacttccccttttaaaagctccagacacagccaagcacccctattgctctagcaaagtatgaaaccccagaaatcaatggtttggggaagagtcttaggggaaataaaagcttccttattcttagatgggatagaacaagagcagttcaggatcaataaccatcccaccccatgataaaacatgccccttccagaacctttccttttttgttcattctaggtgtctatctggaacagctggggtatttgagccacagctaagcttctgaaagtattctaaggaatagtttttcacttacttgattcctttgaaaataggggtatcttatgtgataactgctatcccagagtctttgatcctctgttcgttctcaagtcttggctaccgtgtactacttcaaagctctgtagatattttattctaaagaaaagaaacttggttcctttaagttgttgttgaaacatttctctctgggtataaacttgggttgtatctgggagctctgtttaaaaaaaaaaaaaaatgtctttagtaagccaaagctgttagaagcttataagtaagtgacattacaattgatggtcagtaaatagtggaaagatcgcatgactaacttctccttcagatctgagacaacctggagctagacttttgtactctctgctcagaaaagcacatagtggctcggggtttgatgtagtacaaaaatgacatgcttatgtacaactttaactttctgcagcactttttacaacttcttgtgaatgaagtaggcagggcttgcatttgacagatgaactatgtccagcgtgaggcagagttaaaaccctttccttggctcaggaacttcaggctggggcctgtgtctgctctccctatatccctgtcctctagcagatacctctctgctaacatgctgagtgtcctcggtaaattactcaatctctctgtctccgtcttctaacctccacaataaagcccctcgtagttttaactatctttttcactgcgccccagtgagcaggagtttggaacttaattgctgatggaaaggcaatatttggatggctaaacacgctttccaagctatcttgctgattttcctctcattcctggagataactcatctttttgtaagtgtttctttgagtctgtggattgctcttaacgctcttgtaggtcctgccttcatttgggaacaggggcaggcggaaagaaaaggaagtgtattgcaactaccaatatcttcctctaggaggagctgcgcagcccagatgagagtgacacgcaccaactccagctcctcgccgggaagacttcatcccagcaactcggaacgcttggccggggcggcactcggtctctccgcagcagttctcgaactggcctccttgaacgtcggtttccccttcgcttctgcagcctggatctgggggacggcgggccaggcccggcgtgaccgctggtgaacggtggccgccttttcccacccctgctctcccatcctcccttcccgttttaccccgccccctctctcctccccaagcctgacagcccacgagctgccaagcagggcgcagccatgggaagaggaggagggctagggagcggcggcggcggcggcggcagcggcagcggcggctgctacagtggcggtggcggcggcggctgctgctgagcccgggcggcggcggggaccccgggctgaggccacgcgggccggaggccccagcaccattggccccagcgcagacgcgaacccgcgctctctctccagaggcgaagctcggaggtactggagtggggctccgggagtctggctttattttcctcctgttgtgccagggggcctgagagtgaaccctgggactctagttgtttatgaaaatgggaggatctgtcttatatatttacatggatgattttttatttcggatgacttggctgtgctcccctcctccttgcgaagaagttgttttctgctggtgggttgttgtaacccaatcgagtgtgtgtgtgtgtgtgtgtgtgtgtgtgtgtgtgtgtgtgtgtgtctggaagttggtggaggcggcagggagttgcgggcgacagacgaaccatcccactctggcgtctgctgtggcccgcgagtagggtgcgtggaggggtttactccggagatagttttgttaaagtcataaaagttttgctagtgtgtttctgtttgccatcatctgcctggctgaggcagagctgccgaggctgctgctgctgcgcggggaaggatctccggcagcgagactggagagattgggaaggtcgagctgtgcgcgtgaacacggcgcgcagagcgcgcagtcttttgcgcgtttgtgcgggctgcagccgcacattggcaccggtggaactggggtcagtagagtgacggccaccagtccgcatgaattggcgtaagtggaaattgtggcgagccgtcctccccgagcctccccgagccgtcctccccgagcctctacaactagtggttgtaaaatcaaccaggcttaaagttttgacagaactgccagaggtgcgggtcaatggggtggccgcgtgtctagggagagggcgctggcggcacagagggtgcgggtcagggtcacccacttgcgagtgcgtggggaagtctatttggggcgaatgctttacatatagccggaggagatgcctgctgagaccgagctgcgggggttctcggtctggcgtggactgtgtgtcctgaatgagtgtaagtgtgcgctgtttgcgcgcgcgcgagtgtgcgcctggggaggcgtgtcggcgcctgagccagtcgggtgtgcagggtggaagaggccacagaggtgccgcctgcctgtttgtgcagccaggagaccttggaagggacagagaaaggtaacgggaggccaaagtgttgggaagtcagagtagtttctgcataggattaagtattaagggctttaaaataactaaacccattgccctgagtgactgaggactggaagtgagcgtttggggagttctcaggagaactgcatgggagggcgtttgggaggtctaagagatgtgtaatatgtgtgagtacagaacttcggagacagacacaggttggagctatgaatttgagattttcagggtgctgctgtccacagtccagggactggctggtttcagaggtgttcaggctccctggtgtgtgtgcctgggaagacactcatcttttctcccagacatgggatattgtggcagctcaggttctgtttcctgagcaactggtgttccaggctggtttccacctgaatcaccctagaagtatcttttttctgatgataaatgttgaaacatttccagaaattaaaatgctggatagaaacaaaattgatgcagcagataggattgttagtgattgggagctctttttccctttgagaaaagcaaagcttcgtgttcccagattagatttcaaggagtcttcagttatttacagcttcccttcagatgggcctttggatggagctggaaggatgtgttttggcctagagacctttggaagacatcatgtgtagcttaaaggggttgtcccatctgtcatcatcttcttccacccttgtaaacttttgttttgcattaatctaaggaaagttggtgagtcaacatttagctttttgttgttgttgttgttggagtaaatatatcacagtgaaattatagttgtggtctcctgaaggccatgcaaaccaacacttaatgggcaaaggtgtgaaatgaaagtctataaatgcaatgacaaagtgacgagatgaatgcattcttttttcaaaatgaacataactgtgctcacaaaaatttattctagccaggattgggcccatgttttttatcattagtttttaaacagcagactccacatcataaaccactttaaaatggatactagaggcctatgctatctctggcgcctgcttaaacagatgtttacagtgcttggtaacctatgggattgtcatgttgagtatcttgttagctcaggacataatgtttatagcataatataataaatggagccacagttgcagcatgcttcttccaagtgcatgaagcaaatcttgcatcagggaaacaaattctgcagttggtccaacttggctagccttctttgggtatctcctggtaagcactgttaatgtaaagataaatgtgagtaacacggtgagaaagtaggacagtaaattgtttagcttagtgaaaaaaagcatggattatgctttttaaatctgctaacctgaagattacacttctcaggttataccactggtaaattgcacaactatgagaatttggtttgcttttaaagaacaatttttaagaagtatgtcaataatgaaaataacatatttcttaatgtgtttacatgtgtccatacaagccaatactttttcttctttaaaaagaaccctataatttctgtggtaatgatttaaatgttatgagcattcaaatcacctaatcaccttttcaatcttcaattgataagaatcgaagtctggtaagactggagtcatccctcagccaattgtgtaaacaagacagtacagaatgtctttctggcaagtaatttttttcaacctgaaacagataatataaataatatgtcccataaaagaattacttaggatgataattactttagaggtaattatctggtgcatgaacctccatctgtgaaaatggtctaatctatctcttcttggaaataatcagttggaaatctccctttttcattgttcagtccattctaggaaagattgatttctagaaagttctgccttatactgaatcaacattttcttccatccacttgcctgtccttcaggagctgaccacaatgaatctagtctcttttccctgtgtttaccatacttgaaaacaaacattatgctccttgctgaatccccttttgcctacttttgtagcagtttttcacccactgtagggttccaccctcctctgccttgaaccatatgcccttgattctacattctcattgtattagtctgttctcatgctgctaataaagacatacgtgagactgtgtaatttataaagaaaaagaggtttaatggactcacagttccacatggctggggaggcctcacaatcatttccgaaggtgaaggaggagcaaaggcatgtcttacatgacagcaggcaagaaagcaagtgctttctataaagggaactgccctttatagaaccatcagatctcattagacttattcactatcatgagaacaacatgggaaaaacccacttccatgatttaattaactcctactgggtcccttccaccacatatgggaattatgggaactacagttgaagatgacatttgggtgaagacaaagccaaaccatatcgttccactcctaccccctcctaaatctcatgttttctcatttcaaaagcaatcatgctttcccaacagtcccccaaagtcttaactcatttcagcattagctcaaaaatccacagtccaaagtctcacctgaaccaaggcaagtctcttccacctatgagccagtaaaatcaaaagcaagttagttactttctaaatacaatggaggtacaggcattgtgtaaatatgcctattccaaatgggagaaattggcccaaacagaggggctataggtgcaagtccaaagtctaatagggcagtcatcaaaccttaaagttccgaaatgatctcctttgacttcatgtctcacatccaggtcacactgatgcaaaatgtgggctcccatgaccttgcacagctccgcctctgtggctttgcaggatacaacttctctcctggctgttttcatagctggcgttgatggtggcttttccaggcacatggtgctagctgttagtggatctaccattctgagggctgggggatggtggccctcttctcatagctctactaggcagtaacccagtggggactctgtgtagaggatccaactccacatttcttttccacattgccctagcaggggttctttatgagggctctgcccctgcagcacaactctgcctggacatccaggcatttccttacatcctctgaaatctaggtggaagttcccaaacctcaattcttgtcttctgtgcacctgcaggaccaacaccacgtggaagctgccaaatcttcaggctttcaccctcttcagtcgtggcctgagctgtaccttggccccttttagacatggctggaggggctgggacacagggcaccaagtccctaggctgcacctaacaggcccagaaaaccatgtttcctctaggcctccggacctgtgatgggaggggctgccataaagacctctgacatgttctggagacattttccctattgtgttggtgaccaacatttggcttctcattacttatgtaaatttctgcagcagtcttgaatttctccccagaaaatgggtttttctttcctatggcatcatcagcctgcaaattttccaaacttttatgctcttttcacctcgtgaatgctttgctgcttagaaatttcttctgccagataccctaattaatctctctcaagtttaaagttccacagatctctagggcgggggcaaaatgcctccagtctctttgctaaagcattaacaagagtcacctttgctccagttcccaacaagttcctcaccttgatctgagaccacatcagcctagactttattgtccatatcactataagcattttggtcaaagccattcaacaaatctctaggaagttccaaactttcccacatcttcctgttttctgagccattcaagtctctagaaagttccaaactttcccacattttcctgtcttcttttgagctctccaaactgttcaaacctctgcctgtaacccagttctaaagttgcttccacattttggggtatctttacagcagcacccagtctaccattaccaatttactgtattagccgattctcatgcttctaataaagacatacccaagactgggtaatttataaagaaaattaggtttaatggactcacagttccacgtggctgggaggcctctcaatcatggcagaaggtgaacgaggaataacgcactctcacgtggcggcagacaataaagcatgtgccagggaactgccctttataaaaccatcagatctcatgagacttaatcactatggcaagaacagcatgggaaaaactcgccctcatgattcaattacctcccactgggttcctcccatgacatatggggattatgggagctaaaattcaagatgagattggggtggggacacagcaaaaccatatcactgaccatccctcctaatgtgtgttttctaaaccgaagatttagaattcgtagttctgaacattctatatctattaagacagtttaatattaatgaaattctttagccatttcattacactcttgattaatttcatacctataaacaaaataacttgttcttttcagattattaatcatccatagtcaaagcatttttataatagcttcaaaacattttttcatgcctgaaggtactataaatttatggaaagtataatactgtgtgggtaaataaaattctatatgcagtgcaaatagagccttaatttctccctatcagggaatatcaaccccaaaataccggaagtagaatgttccaaagataaacaagttgaagctacatgttatagacaggtagggactatgatgtgtttttttcataggcctcattgtgtctgcttccatgaacatgaatcagtactagcaatcaggcatgtattgaagacttgttctgccgaagtcccagagagtatgccatctggccttaaatgaagtgaaagtacatcaaataaagatacttccttgggcaactgggatttaagatgtatatgcaggacatgactaagtcaaccatctactttttctcaggaagtaaatggcttgccaatgccacaggaaagtctaaagcgttcacactccataagcgtgtcccatgtcctgttgtgtgtctggacaggagctggacaaaggccctgttactacttctagcttaccaagtcttagctgccttggaggaagacagcgaatctggcttatccagaggagaggcctgaactgtgaatggggtacctacctggtgtgactgatttctcttttatgtatctgtcttgggcttccagctaaattgtgaattcaccttgcattgtcttcctacacacacacacaaacatttatggtggatgttgaagacaatgtcagtttttcagcaagtctgaatgtgaaacaaatgactatgtttcttggtgcagtggggtgtgaggatgagagacaggaaaccaacctgtgatataaactgacatctgagcctaccaaaagccctttgagagacctttgatcaagacaaagggataatcatagccttgtgcacttagatgaaattgtccatgctattcctgtatgtgtgtgtgtgcgtgtgtgtgtatgtgtgtgtttcttcactttatccccagcattatggtctcaattcatatacatttgcttttttctttattctattctgatataaaggaaagaaataatcaatgattcatttcctttttttaacatttcaaaaatttatttcattattccctacctcccagtcctcaccccccaaaattacaattacgatagacccattggcaagtacttggacatgcaattttcaaaccaaaggtttactttgctataagaaacatctaagttaggatgttataatatgaaataatagcaaattagatgtcaagaaacctgggtcctctccaagctctgcctttaatgggctttgcatttttttgcaaactatttaaccttcctgggcttcatatttcttatatgttaaaaacaaacaagcaaaaaggaggagtaaacaaaatgaccccttagaattctcttcagggttatggtttgaatgcatttaattatcgaatttctctcttcttttaaatgtaagcatcaagaaaatatttgcctattttattctctcatcattaatttttaatcaattaaataaagtagatgaaaattttatcaaaaccatgtttcttgctttcattctaaaacaatgcaactcaccactatctgattcagaaagtctttctgaaatagtgtttttttcttttgttgttgttttttctttgtgctaaagaaaattcattgatgagtaccaagttcttaaaagaaggatggaaaagtcattgttgtttagtctcaacttctttcttcagtgcttcctcctacctcttaaataggcaaataaagccttaggccaggcactaattttgcttagtaatgattcataagaaggtagtgattttgtcagaaattgctgggctgcatgcttttaatcagcgtctaaacttaccttgaaatactccattccaaaatcagcagataatttcttctagagagtctttcaaactctagtgtcaaacagatgtgtttactgttttgattagggcttatttcttttgttgttgataagacttcagccagttttctttagactaatattattatattcccaatgaattatactcttaggttgtgaatttgtttaaagataaatctatctccagctggctggcttccaagtaaaaagggtatcctagggaagaagtgcacttcacagggattcagtacaggtgtagagaattccctgatagagaattggaacacatcaagagtttgcaaattgaaaaggtacttttatgtgcttatccatggtggacaacccgtgtcctagggaagaagcgcatttcacagggattcagcacaggtgtagagaattccctgatagggaactggaacacatcacgattttgcaaactgagcaagtacttttatgtacttatccatggttgacaacctactgtgctagacatttgctgtagtaactccttgattttttcctcagttgtttataaaattaaacagttgaagtagcctattgaaaactcttaaaagaggcctctcttatattcctttagaatacagtatattaaacaagtgataaagtccaaagaaaaatccttattcttttcttgctttaaaaaatgcactttattgtattaagcattatatctatcttttaaaactttgaattgccatatcaatgaaagtagagtgttatcattacaaaacagaatcgcagacagtgcttattgaaagaaaagatgcataattgatgctgtaaatgctcatcttgaatttgatgatggctggtgagaaacctcagtcggacattcaattttgattgccattggtaagaaaggcagcctttgttctttgtcattatgtggcacatgatcctaattcaccctatcagctgcttctctgcacactttcaagctatgtgattgttatactagaaagcatctaaattggccaaactaatgaagactaatctgacaaagcacgtgtgaatgataaattgtgaaaagaccctgaaaatagagcctcttcagtggcttcttcccctaagggtagaagataccagaatccctgggcaagatgaaatagataaaggaacgacatcatttttatacccagcaaatcagaaatattaaagaaagagaagcaagaatgaagaactactactttcatagttcattcttgcagtgtagcaccttatttcccatagagacattggcgaaaccatgttttgcgttgccatagaataggtgttcagtaaatattttccagatggccttaatatgtagtaaaacagagagaaatacggaagcattgacaagaagtttgtggataatttgagggcaaaaggatgtggataggatcaggttcataatgcaaatttgctattattctccttagattaatgatgtcacccaaacttcacgacctgctttccaaggtatatgctgttcacagccttggaaacatttagaagtttttaatacttggagcaagatggatatatgtttcacattttatctaggacttagtaggacttgggagacatatctactttgccagatcttagtatacttattacggagcatgacattttaattctctttgcttttgtcctataaagtttagtgttttatttttctcagtgcatatagggagtgaattatttatataatctgaaaagtactttgaaaactacttgggaagagatgttgaataaataagttgttttttttttttaaattagcctacaggatgtaagtctggccaggctagtggtatttttggtatcattgtgaaaaatcaaaaacagaacatgcatttatcaatccattagtgtgttctcaggaatgtgctagacactagggaatataaaagtagtataaaacatgactcttgactttaggaccaagcattaaagccagaaggcaacactattaatgtaaattcatggtgtgattatggaacagtttatgactgtacaacttaatgaaaagttcattacagactaaaaatactacatttatttagagagaaggaaaatctgttcagattgaaggatttgaagagtggccttcatgggcaacatggctcctgagccaggacttaagatatggtttttttttttttttttttttgataggttagaagggttggagaggtttcatgcaaggggttaggaactgaggaccaggaggcgtatcttgagctcactgggtttactgataacagggagcaggcagagagtaccaggctgtagatttgttttccattggaagctcttcccatttcttattatggttgctgcatgtaggcttatcccttgggtagggctattggaatggccaccctgagcctattgcttattggatagtggtggcttctgtgtgatatttcagcacatttctcttttctgaacattatgtaaattcaatcgtaaaactactttcttaaacaatgttccaagaggcctattaaagatgccaacaatatgacttccattcaagaatacgatcttgaatgggctttacaatggcagagctgacctgagattacctcctgtactcctgctctcaagccatatgctgatgctgactgtcctggtccaatagagccataaggcctcatagaacttgagatcatctaccagtggctttcaaccaagccactgcctttctgctaggtagtgcatagggacattgggaaatacagttattacaagaactggaaagagttgtaggcttttggtgcctaaagtcagaaatgctaaatttctgtggtgccaggggcagtcctatataagaaattattatgccacctcaaatgccagtagatccctattcaaatatttgagtctcatgtcctcactttatttataggtgaggaaatgggaggtcctgagaagtgacacaactttcttctaggattaaacttcacagtgtcagtgacagatttataactcaattcttttaattttctttcaagagctcttgttgcagcaccacagtccctcctattaacatgggctataactatggaatagcatgttgtttatctctgtcatttttatggaaggatgatagttagctgtgttaactatctgaatgggtgcaatgtgcatagagataactggtacttgaccagcagttctttcccctgggaacacacacagattcacctgtaaattagggttggcagatgcctgttgagatgtcagccacagccaaagcttacagataggctgactttctggaaagggcatggagtaggctttggattcacacaaatctgcttgtctgacaggatttgaatacaactcttcttatctttactatctttgtgactctcaaccaattaaactctctgagctttagctgcaaaagaacaggtgatgattcttatttcacaaggaatgagtcaaaacagttcctggcacatattgggcactgcagatatagagaattccctacagtatctttttgagagtaaagacttgaaaccttcacttataaaagatcctcctgataacagttgctatttttttctcctcctttccccaaacaaccaagggctttaatgagtccctgaagtgtttattttgtttaaactgttgagatttccctccttcagaagagtcctgctggccagagatgagtttcttttgactcctctgtcaatgtccctgtattattgtcatatagtaaaaatggaagatttatctagatggttattagcaggttatgaaacttagattttaaagtcaagaataaaagccattcctgggtagagatgtttttcagagagattgctaccttgccagcgatgagagagcctccttaggtgaggtgaatacttttggcaagttaaaggataacacaatataatttatttaagtaagttttttatttgggactaatttcaggtttgcagaaaagttgcaaaaattgtagaggtcctgtatgttcctcacctagtttcctatgttaacatccataatcatgatgtatttgtcaaaactaagaaaccaacattagtacaatgctattaactaaaatccagacttcatcctaactcccccagggcttccactcacatcgttttttctgttccaggattaaatccataagagtgcactgcttttgattttatgattttttaaatactgtgcatatactttttttatttgggccctctcacatgttaaactaactggcctttgtaaccagatagcaaattctataacagaaaatacaatgatgttgaatccagcatcatgctggacacaaagtatgttctctaaactaattaaatttatcacagcaacaagaagaacaaaattttactcagtgtacatatgtgtagctgagtcctcattggtaagctaagaggtactcataagagtgggatgacttggaaaaaatttgattttgaatgtgtgccctgaacattggtgtaaagcaggaccccctaaatcaacattaactgagtctgtacaatgtgcctagcatagtgtgtgcatatcacacttactcctgataactgtaaggcacatagccttgagtaacttagctgaggaaatgagaccaagggaagttaagttacttgcccagggattcacagctagtaacaaaactgagattaacacatgtttttctggcttcagaacctacactcctaatgtggtattcaattactcccacacttctccacttgcttaatccctattcttggtgtcctttttctaggtatacagaatttgaaaactctatattgtcaaactgcagccaacctggatacacggtatatacttttttgtgagctggattaagtttcagccttgaatttgtggattattttcaaaacctacctaacatctgtaaaacatgttattttttaatatgtagatatccacgtaaattgaccacaaagctcttcagaaggtcccataaaccaataattaataaaattttgagacatggctaataacaggcacagaagcatctgcaaagggcaggacattgatattgtataataatttaaagtattttattattgtataatgtgcctgagttttggataattgaccttcatttctcagtctttacatagttactgcttttttaagtgtcacatgagggatgtggaatattcagtgaaacatttgactaatctttatattttgagtggcccaactgaaaattacccttggttgccttggaactctgggaatgatattcaaaagtagaaattcttgcaaattatttgagctttggctctgggaagataaacaacatgaataactaggttaaccagagctgaaatttctctaacctataattctaaattcagaaaagaatgggctttagggttttttgtttatttttgctttgattacaagttgttggaagcctagagttagtatctaataacacaatctatgtaaaacacaaattattggctcagaatgatatctaatttctaagaagatacaagaaggcaatcacgtaaaaacgtgcttttcttcatagaaagaataagctgggattggccaaaaggtaatccctttagagtctaaggtttagagcattgcatatttttaaagaagatatattaccttttagaacatacataagaaaccattttctttgcttatatggctacataaagttgtcatggttttaaactgtgaccttagatcccttatagaagtaattacaggcacaatctgtgaatgaagatttgcaaactatgcttcaccaagcctcagggactattggatgtccagaggacagagccatgttggatgtcttatgggccttcagtcctgcaaagcagtgtgctttcatgttttatacgcagcagttctgagaaaatttaagttgacaaaacagcctctcttcttattatttttatttatttatttattttgagatggagtgttgctctgtcgccagtctggagtgcagtggcatgatcttggctcactgcgacctctgcctcccgggttcaagcgattctcctgcctctgcctcctgagtaggtggagctataggtacaggccaccatgccctgctaatttttgtatttttagtagatacagagtttcaccatgttggccaggatggtctcgatctcttgacctcgtgatctgcctgcctcagcctcccaaagtgctaggattacaggcgtgagccacggcacctggtgcaccagcctatttttattttttaaagacctgagtgcagtggtgcaatcttggctcattgcaacctccacctcctgggctcaagtgatcttcttacctcagcctcccaattagctgggactacaggtgcatgccaccacacccagctaatttttgtgtgtgtgtgtatatatacacacatatatatatatataaatagagacagggtttagccaggttgtccaggctgatcttgaagtcctgagctcaagtgatctgcccacctcagcctgtccgagttctgagattacaggtgtgaggcaccatgccgagccatcctctcttctaataaaaaaaaannnnnnnnnnnnnnnnnnnnnnnnnnnnnnnnnnnnnnnnnnnnnnnnnnnnnnnnnnnnnnnnnnnnnnnnnnnnnnnnnnnnnnnnnnnnnnnnnnnnnnnnnnnnnnnnnnttctaaattcaggcttacttttgtaactgctagattataaactcttagagggcaaagggctttgtattctctacttgtgtacactcggttagtttgcttaagcagttacttctgtgtaagcaacattaatgaagtgcttactatgatcaagggctataccaagtccttttttatattgtttaatcccacacaaaacccatgatcgacctaattctacacttggtgaaactatgatgtagggaggttaaataatttgttcaaggacccacagctggtaagtcgcacagtttattcaaacccagatcttcctaattgcaaatgtgtccaactcccatgcttctaaccactgcctatgtggtagttctttgatattcctccctctaagaagtggagtttaattcccctgctccattgaatgtgggccgaactcaggtgactcatttctgttaagtggagtaaagtggaagtgaaaatgtgtggctttagcgactaggtcattcaaagacattcaaagtggtttctgtcttggttgttctgtctcatacctattgggcatttaatctggggaaaatttaatctggggaaaatttaatctggggaaaactgccatgttttgagctgtttatggagaggctaagatgaaaaggtactgtggatccaacaggcagtttcaaatgaggacctgaggccctcagaccgacagccagtgtgaaactgaagcctcttgaccacagcctccatgagagtaaaagaatcttgaccccctagtgaaccacagcctccatgagagtaagcttcaaaacagagccttaacacctagtggagcctcgagatgactgcagtcttccaccaacagcttgattcatgaaagaccatcagccagagccatccagctaagctgcttctaggcccctactcctagaaaataactgtttgttgttttgactgccaagtgttcagttcctttgttatgcagcaatagataagtaatgcagcctaacactgtccttatcattttttaaaaaagaaattgttttaattttactaaatcacaaattttaaagcattgatacagcaaggagaaactttccagaaaaaaatgctgccaaatttaaatagtaaaatattaatgtccaaaaaacataatagttacaatgacatctaggattgaggattttgtaagtcaaaggtcagccacttaaaaaattcataattttaaaaggaaggatattaataataactgcattattgaacatagatagcattttgaacttttaagaaatcctcatgggaaaactcaggaaatattgtttggtaagttatcactcataatcttaaattgttaggcgcatgtttgcactttccatgattgaaagaggaatgtaaagcaaagttgaattttaacctcttccctagtgattttactcagcttttcaaaggggtcctgaaagctcagaggtcaagtcatttcttggtttgctctgcctgacaaattgcattaactctgttttatagccactttcagtttaataaatgacttggactttgattaatatctttagtgcttaagcccaagaatttgtataagactttgggatatagtactgtaaatttatctaaagatggacactggaaggtagaaggagatatattagtgttggtttgggtacatgtctaggtactgaatttggatcatcataagtccttacagaagatacttgttgatttgtcttttaaaaaaaaagtgaaagtgattttttaatatatttacaaagtgatttaagtgatttaaggaattcattcatgaagtggatatggctagttcttgtttagtattcagaatgactgtaaaatagaaatgctgattttccttgcccagattgtagaacacagatcaaaccctcctagtccttcccttaaatgttttttctccatgcagcttacaccctgaattctcaaaacatttgttatattgaactggactggatagtatatgcctgaccctgattcatgggattatgctgcaagggaatataaagatgaatattgatagcctgagtgtgaaaattcataattactctcatcctcgttcattaattcatttgttcattaactcataaacagactaattgattcaacagatatttattgaacatttacactttgcccagcagagcactggactaggtgctagcacagtataataagcaacccagaaatagcctctgccctgctggatttcatagtctaagatggagaaaggcattaaccaagtgtaatttaaaatcgttttaagtaatgtgaaataaatatatatgagaacctgactcaggttgggatttgatgattagggaaagctttcaaaaaagggatatttgagatctaaataagagggagaagaaagagacaatggctagagaaaaaataggatccaggaagatacttagtacttctgagaactaaaaacagccaagtcagtgtagtcagagttcaaagagggagaaagtacatatctaagaagaagctagaaaagtaagaagggactacgtcttacacaatgatgtaggctgtattttagtttttacttatcttaagagcaatagaagaccattgaagggtttgaagcagggagtgacataatcaggtctgcattttaagttcacctgctctgttatgaagcatgactggaggaggatggaaagagatattcagggagctggattataagtctgttgtaggccagaggtattggtagcttggaccggggtgatgatgctgaagattgaaaggagttaatatatttataatatatttgtgaagtaaagttgactgtacttagtgctgacttagatagtattggtgagggatgtcatggtaaattccaaggtattgggcttcttcaactgaatgggaaacactagagggagagcaggtaaaagttgagggaaagtgagggacagtagttcattttggggatattttgatttcgatgcctttttaagacatcctcaaggagacacagtgcagtcttgagtcttggatcagaggagatacctgaatgtataaatttgtaagacagtggtttatgcacactattgaagccacagaggtaaatcagatgatgtacagagtgcaaatgaagtgagagaagaaagcataagtctgagccatgagaactctaacatttaaaggccaagtggaaaagttgacaagagtgggaattgtgactagggtagatgccagagtggcatctcagaggccaaggaaagagaatcatttaaggtgctgatgaggggtaaagtaagaaggtcctgtaaatgtccccttggattaataaaattgatgttttgaaagactttaaggagagtgagtttgttgtagtgatggggacagaagccagaatgaaatgtcatgggaaatgggtgggaagtcttgaaagagagacaatgaatataggtaattcaagatatgtggtcaagggaaacaaaaaggataaggctttaactagaggaggaaatagagttaaaggaggaggctttttgtttttgttttgttttgttttgttttgtttttgagatggagtctcactttgtcgctcacgctggagtgcagtggcgcgatctcggctgactgcaagctccacctcccaggttcacgccattctcttgcctcagactcccgagtagctgggactacaggtgcctgccaccatacccggttacttttttatatttgtagtagaaacggggtttcaccatgttagccaggatggtcttgatctcctgaccttgtgatctgcccgccttggcctcccaaagtgctgggattacaggcgtgagccactgcgcccggccaggagttcttttttttttttttttttaaagatgggagaattgagcacatttaaacactaatggggaagaccagtggggaggatcaggggtggcctgaagatagacagagggtggataaataatcatataggattcctgagaagatagaagaagttggatccagagcacagcagggggaattagttggccttggagaggagagatgatctctaccctctgttctagaagaaagccaaaggtgatgtgtgcagatgcagaggtgtgtttgatgtggtggaggcaagtcaaaggagtttttgttcgatgccttatacctgctccagaaagcagttgagtcaccaactgagagagggagagagaaaggggctagcatactgggaaagaaaggggatcatttcagatatttgaggaggacagagaaagtttgaatatgaaagggagtaaatgagtaaaatttagtaggatttctagtcattttttgaaagctcagctgaggctgatgatcatgaattcatggtgataccattgttagaattattataaaatatataataatatattatatattcacctccttttggaggtgctcagcagtttactagacagaaaagcagggtcatctaggcttaaaattttgtcagagaggtatgatgaaaagattgcaaaggagattaggatattggcatgggcaagggagcttctagagtgataaaccaggaatctaagcctgctagtgggggacatgtagacaggagaaggagagtataaagatctttgtgaaggctggaggaaatttgtaatcagagtggttgattaaacaagacagaagtatagcagtcagtgatcagcacaggatgctgcaccccagatcaattaaatctgtatctctgcatacagggcccatttcagcttctcaggagatcccagtgctttccttaagggagaatattgatataactgttattaagacttgtgaaaaagatattagcaatgtgaaatcaagacaaaaacacaaacacagaaagaagttagacaaaaaaaaccaacaacacagaaattacacattttctttttcacaaatcaaagtcgaattcatgggccttcctccctggctcattctccctgacattagaagtacaaagggagtaagtaaagtctttatggggaagatggtataattaagcaacaattacctagggaccagatgcttttgaatttgactgatggaaacagaagcgtggtgaatttgttcactacagtctttttggaggggcaacactcttggctcacttggcatgaggtagtttcagtctggctacaaagatttgaatgtgggacttgagtttctaaaaggggactaactggccttctgttagccaggattctcggacttggtggctatatcacggcttatgctgtcttggaatggtcttgggcccagttgaaatttcttgaaattacatatgaagattcattaatgtattacttggaattcagtgacaaggatcatcattgccaggtttcctagttaggaaaacttacctccattccttccagttaaatagaagaccattgtatagttcatttctggttaagtagagtatttatgaaatgtgtagggcttataggcataactattgctaaagaaagcccagtaaagcttgacattccctctgttgcccttgtctgtctttccataaatttaatgtcaagagcattttttgagaagatgatcacaggatgattcaggtagacatggagcaggttgtgaaaacacttgaatgtttcaccaatgcattagggtttccagagaaacagaaccagtaggggtgtgtgtgtgtgtgtgtgtagatttattttaagacattggctcacacaattgtggagactggcaagttcaaaatgtgcaaggtgggccagtaggttggagacccagagaagagctcatgttgcaggtcaagtccaagtctgctgcagaacttccctttgcttggtaggtcagtctttggctctattaaggcattcaactgattggagggcagtttactttactcagagtacatcatttaaaattttaatgtcatctaagaacactctcatagaaacatttaggatattatttctgaggactctgttctgttccattggtctatatctctgttttggtaccagtatcatgctgttttggttactgtagccttgtagtatagtttgaagtcaggtagcgtgatgcctccagctttgttcttttgacttaggattgtcttggagatgcgggctcttttttggttccatatgaactttaaagcagttttttccaattctgtgaagaaactcattgggagcttgatggggatggcattgaatctataaattaccttgggcagtatggccattttcacgatattgattcttcctatccatgagcatggtatgttcttccatttgtttgtgtcctcttttatttcactgagcagcggtttgtagttctccttgaagaggtcctttacatcccttgtaagttggattcctaggtattttattctctttgaagcaattgtgaatggaagttcattcctgatttggctctctgtttgtctgttactggtgtataagaatgcttgtgatttttgcacattaattttgtatcctgagactttgctgaagttgcttatcagcttaaggagattttgggctgagacaatggggttttctaaatatacaatcatgtcatctgcaaacagggacaatttgacttcttcttttcctaactgaatacccttgatttctttctcttgcctaattgccctagccagaacttccaacactgtgttgaataggagtggtgagagagggcatccctgtcttgtgccagttttcaaagggaatttttccagtttttgcccattcagtatgatattggctgtgggtttgtcataaatagctcttattattttgaggtacattccatcaatagcgaatttattgagcgtttttagcatgaagggctgttgaattttgtcaaaagccttttctgcatcaattgagataatcatgtggttcttgtctttggttctgtttatatgctggattatgtttattgatttgcgaatgttgaaccagccttgcatcccagggatgaagcccacttgatcatggtggataagctttttgatgtgttgctgaatccggttttccagtattttattgaggatttttgcatcgatgttcatcagggatattggtctaaaattctctttttttgttgtgtctctgccaggctttggtatcaggatgatgttggcctcataaaatgagttagggaggattccctctttttctattgattggaatagtttcagaaggaatggtaccaactcctccttgtacctctggtagaattcagctgtgaatccatctggtcctggactttttttggttggtaggctattaattattgcctcaatttcagagcctgctattggtctattcagggattcaacttcttcctggtttagtcttagaagagtgtaagtgtccaggaaattatccatttcttctagattttccagtttttttgcgtagaggtgtttatagtattctctgatggtagtttgtatttctgtggggtcggtggtgatatcccctttatcatttttaattgcgtcgatttgattcttctctcttttcttctttattagtcttgctagtggtctgtcaattttgttgatcttttcaaaaaaccaactcctggattcattgattttttggagagttttttgtgtctctatctccttcacttctgctctgatcttagttatttcttgccttctgctagctttcgaatgtgtttgctcttgcttctctagttcttttaattgcgatgttagagtgtcaattttagatctttcctgctttctcttgtgggcatttagtgctataaatttccctctacacactgctttaaatgtgtcccagagattctggtatgttgtatctttgttctcattggtttcaaagaacatctttatttctgccttcatttcgttatgtacccagtagtcattcaggagcaggttgttcagtttccatgtagttgagcggttttgattgagtttcttggtcctgagttctagtttgattgcactgagagacagtttgttataatttctgttcttgtacatttgctgaggagtgctttacttccaattacgtagtcgattttggagtaagtacgatgtggtgctgagaagaatgtatattctgttgatttggggtggagagttctatagatgtctattaggtctgcttgctgcagagatgagttcaattcctggatatccttgttaactttctgtctcgttgatctgtctaatgttgacagtggagtgttgaagtctcccattattattgtgtgggagtctaagtctctttgtaagtctctaaggacttgctttatgaatctgggtgctcctgtattgggtgcatatatatttaggatagttagctcttcctgttgaattgatccctttaccattatgtaatggccttctttgtctcttttgatctttgatggtttaaagtctgttttatcagagactagtattgcaacccccgcttttttttgttctccatttgcttggtaaatcttcctccatccctttattttgagcctatgtatgtctctgcgtgtnnnnnnnnnnnnnnnnnnnntggtaatcttcctccatcccttatttgagcctagtagtctctgcgtggagatggtctcctgatacagcagactgatggtctggactcttatccagtttgccagtctgttctttaaattggagcatttagtccatttacatttaaggttaatattgttatgtgtgaacttgatcctgccattatgatattatctggttattttgctcgttagttgatgcagttccttcctagcctcgatggtctttacattttggcatgtttttgcaatggctggtaccagttgttcctttccatgtttagtgcttccttcagggtctcttgtaaggcaggcctagtggtgacaaaatctctaagcatttgcttatctgtaaaggattttatttctccttcacttatgaaacttagtttggctggatatgaaattctgggttgaaaattcttttctttaagaatgttgaatattggcccccactctcttctggcttggagagtttctgccgagagatctgctgttagtctgatgggcttccctttgtggataacccgacctttctctctggctgcccttaagattttttccttcatttcaactttggtgaatctggcaattatgtgtcttggagttgctcttctcgaggagtatctttgtggcgttctctgtatttcctggatttgaatgttggcctgccctactaggttggggaagttctcctggatgatatcctgaagagtgttttccaacttggttccattttccccctcactttcaggcaccccaatcagacgtagatttggtctttttacataatcccatacttcttgcatgctttgttcatttctttttcttcttttttcttttggtttctcttctcgcttcatttcattcatttcatcctcaatcgcagatactctttcttccagttgatcgagtcggttactgaagcttgtgcatttgtcacgtatttctcgtgtcatggttttcatctctttcatttcgtttatgaccttctctgcattaattactctagtcatcaattcttccacttttttttcaagatttttagtttctttgcgctgggtacataattcctcctttagctctgagaaatttgatggactgaagccttcttctctcatctcgtcaaagtcattctccgtccagctttgatccgttgctggcaatgagctgcgctcctttgccgggggagatgcgctcttattttttgaatttccagcttttctgccctgctttttccccatctttgtggttttatctgcctctggtctttgatgatggtgatgtactgatggggttttggtgtaggtgtccttcctgtttgatagttttccttctaacagtcaggaccctcagctgtaggtctgttggagattgcttgaggtccactccagaccctgtttgcctgggtatcagcagcagaggctgcagaagatagaatatttctgaacagcgagtgtacctgtctgattcttgctttggaagcttcctctcaggggtgtactccaccctgtgaggtgtggggtgtcagactgcccctagtgggggatgtctcccagttaggctactcaggggtcaggggcccacttgagcagggagtctgtcccttctcagatctcaacctccgtgttgggagatccactgctctcttcaaagctgtcaaacagagtcgtttgcgtctgctgaggtttcggctgtgtttgttattgtttactgtgccctgtcctcagaggtggattctacagagacaggcaggtttccttgagctgctgtgagctccacccagttcgagcttcccagcagctttgtttacctacttaagcctcagcaatggcaggcgcccctcccccagcctcgctgctgccttgccggtagatcacagactgctgtgctagcaatgagggaggctccgtgggcgtgggaccctcccggccaggtgtgggatatgatctcctggtgtgcctgtttgcttaaagcgcagtattggggtgggagttacccgattttccaggtgttgtgtgtctcagttcccctggctaggaaaagggattcccttcccccttgcgcttcccaggtgaggcaatgcctcgccctgcttcagctctcactggtcgggctgcagcagctgaccagcaccgatcgtccggcactccccagtgagatgaacccagtacctcagttgaaaatgcagaaatcaccggtcttctgtgtcgctggcgctgggagttggagactggagctgttcctattcggccatcttgctccgcccccccttgttgaggttttttatcataaaagtatgctgaattttgtcaaacgctttttctgtgtctagtgaggtgatcatgtgatttttgtttttaattctgtttgtgtggtatatcacatttattgactcaggtatggtaaacctacatccctggtatgaaaccactacctccctggtatgaaacccacttgatcatgatgtattatcttttttgaaatgctgctggattcagttagctacaactttgttgaggatttttgcaggtatgttcattagggatatttgtctgtacttttagttttttgttatgtcctttcctggtttagatattagggtgatactggcttcatagaatgatttagtgagcatttcctccttttctatctttttgaatagtttcagtattcaatttttctttaaatgtcagatagaattcagctgtgaatccatctgctcttgggctttttttcttggcactttttttttattactctttcagcctcactacttgttatttgtctgttcagagttcctgtttcttcctgatttagtggaggagggttgtaaatttgcaggaatttgtccatctcctctagattttctagtttgtgtgcatataggtgttcataataaccttgaatgatcttttgtatttctgtgatatcggttgcaatatcttgtttcatttcttactgagcttattcagatcttctctcctcttgtttaatttcactaatggtttttcagtcaattttgtttatcttttcaaagaaccagctttttgtttcacttatcgtttgtatttttgttgttattgctgctgctgttgtttctgtttcatttagttcttctcttatttggttatatcttttcttctgctgggtttgggtttttttttttttttttttttcttgtttccctcgtaccttgaggtgtgaccttagattgtctatttgtgctctttcagactttttgatataggcatttaaaactatgaaatttcctcttagcacaacttttgttgtatcccttaggttttgataagttttgtcaccactatcattttgaaagaatttttaatttccatcttgatttcattgttgacccaaagtcattcaggagcagattatttaatttccaggtatttgtatagttttgaaggtttcttttgggattaattttcatttttattccacagttgtctgacaggatacttaatatgattttgattttcttaaattcattgagactcattttgtggccatggtctgtcttggagagtgttccatgtgctgatgaaaagaatgtatattctacatttttaggtagactgttctgtaagtacctgtaaagtcaatttgttccagggcatagtttaagtccattgcttctttgttgactttctgtcttgatgacatgtctagtactgtcaatggagtaccaaaatcccacactattattatgttactgtctatcttgtttcttaggtctagtagtaattgttttattaatttgggagctccagtgttagatgcatatatatttatgattgtgatattttcctgttggactaatccttttatcattatataatgttcctctttgtctttttttttttttttcactgttgttgctttaaagtctgttttgtctgatataagaatagctactcctagactgggcgcagtggctcacacctgtaatcccagcactttgggaggccgagacaggcagatcacaaggtcaggagttctactaaaaatacaaataaattagccaggtgtggtagtgtgcacctgtagtcccaggtactcaagaggctgacgcaggagaatcgcttgaatccaggaggtggaggttgtagtaagcaagattgtgccactgactccaacctgagcaacagagtgagactccttaaaaaaaaaaaaaaaaaaaaagggctactcctgctcacttttagtttccatttgtgtggaatatctttttccacctctttaccttaagtttatgtgagtttttatgtgctatgtgggtctcttgacaacagcagatacttggttgttgcatttctctccattctgtcattctgtatcttttaagtggagcatttaggccatttgctttcaatgttagtattgacatataaggtactgttctattcattatgttagctgttgcctaaatactttttaaaattatgttattgctttataggccctgtgagatttatgctttaagaagcttttgtttgagtgtatttcaaggtttcgtttcaagatttagaactcctttaagcagttcttgtagtgctgatttggtagtggcaaattcccttaacatttgttaggctgaaaaatactttatctctctttcatttctgaagcttcgttttgctggatgcaaaatttttgactgacaattattttgtttaaatatttctcaaggtttctcttgagataacctgatgactgagtgtctaggtgattatctttgcagtgaatttcccaaaagttctttgagcttcctgtatgtggatatcaagatctccagcaaggccagggaagttttccttaatattcccttaaataagtttttctaacttttagattttacttcttcctcaggaacaccatttattcttaggtttgatcatttaatataatcccaaattttgtggaagctttgttcattttttaaaattcttttttctttgtctgattgggttaattcaaaagtcttatctttgagctctgaagttctttcttcgtgttctagtttgttgctgaaactttccactgatttttgtacttccctaagtgtgtctttcatttccagaagttgtgaatgtttttctttatgatatctatttctttggaaaaaaatgcgttcatattctgtattggtttttaaatttatttaattttttttttttgccttttactggtaactccttgagtagcttaataactgacctgctgaattctttgtctggaaattcagagatttcttcttggtttggatccattgttgtggaactacagtagtctttgggggttttatagaaccctgttttgtgatattaccagaattacttttctggcttcttctcatttgggtagactattacttaacattgttcttgtggactgtttttttttttttaaatttcttattttttctttgttaaggatcagactctaatgtttattttagcctaattttagtcttggtgcttgtaggggtgaagactctgtatgagatccttagttatagagtctttatgcactggttttccccagtgctggttttagtagttccattcttgatatgtgggtgaattcactgtctcctgtgaagttggaatggcagggatcccttgacgcttatgtcgtcctctcatggtatacagtttatttactgttcttttatttactgagttgatgattcaggcttcaggacaactggggaggtatccccgggcaggcaccagctgtggctaaggcaagtgggtagatgtaatacccagtgatgagccgaggacacagccttaatgagggtggctggaggagctctcagttaggtgtgctgaaattttatcaaggtgaagagtgggagctacctcacctcccctgccaggtcagaaagaaagctattcacctcacagcctcactcctgtccaagcatttcagctattcagatcagtcaggcacctcttttcatctataggaatgttgttgctccaagtagggaggaattgtgactctgcctctcatgcaggcctgaatctggggtgtgctcttcttgtgggttatactcaccttggagagttccagaaaggctgtctacaggtgtgtccttgctgcattcctgtggaggaagccccagctatgtctgcggtggagtgccagggggaacaaagactccttttccaaggcccttcatggtcacagaggctgcctgcttgttggggtagaggtgcagactttccctactgcacccagcactgcaattgggtctctgctgtgagaaactacccaccagcagaaagatctgaaactcctactattcagattattttgtcccacatagtgattccttgatgtggtgctctcccctttccactagagatgggcttccggagagccagattgcagtgactgttattgttcttctgggtttagccatccaatggagttaccaggctctgggctggtgctggtgaatgtctgcaaagagacccgtgatctgatcagtcttcaggtcttctagccatggataccagcacctgctgtggtgaaggtggcaggggagggatgtagaatctgtgagaatccctgattgtagataggtatagtgtgctgactttctcaaatgctagttatgctagtagtgaagttgtcatgtggacagactcaggacctctggttagccaggatgttgcaggcagtggtattagctgttgtcttctccttcctgggaacaatattattgtcatgagtatggcctgaattggttggcctccagccaggaggtggtgtcttttgtgtttggctgccaaggcagatagaaaaatgccatcaagtggggccaggatgagctgagactcttcttgggctaggcttgtcacagccactatgtaggatggggaggatggttttcaggccgatggggttatgttccagaggggattatgactgcctctgttgcacaaaatagttcaccagggaagtggagaatagccagtagtgaaaagcttcacccagctcccacacagttggtgagcccaatctcactttgcagtgctgtgttaacagcaccaagtttagatccaggcatcctgcttgtggaactcagtcttgctccaggccatatacttccccactgagaaagcaagcaaggctttcaggccacacccctccctgtctgcccataatggcaggagcctggttcctgtgctcatatctgctgcagttcccatccacccaccagattctgttcaagcaggttcacgcccactcaaaattatcacaaaattcagttggaggcttctttcaccttgtaccccctccctaattctgctggctgccttccccgagggcccctgtgatatatagtcaggaatggcttccctgggtttgagctggagactgggagtgcctacaagactctttctgctgctgcttctacttttgtatttcacaaggttccctaaatctgttccagctctaggtaaggttgagtccttctctcatgatttgcattttcagattccccagtgaggaggtgtgtttggaggcaggtttcccccacttacactttgggaactcattgctttttgcctctctcacagtttgcagcagcatgtcacttctttcaacggatctgtgaattctttccattttcttgatatgatcctgtggtggttcttggagaaaaggttcacagtataagtctccacacactgttctgtccatccaagtgggagatgtatgttagccttgtctcctatccgccatctttctgctgtcaaatccttctctttagatagctgacataccatcttttgtttcttctgacttggttctattcactgacattcctctctatcaagtggatttttgaactttcatggaaatttattccctatttatatggaaataattcccaatttatatgaaaagcttacaaagtgattcattaaccaagtatttactgaggtgctaaaattatacactaatgcaagagtggctggcaagtcctttgccttcatggggattacattctcttgtaaatgtcacatgatggccactagatttaggaataaaggactccagcatgaaacactgacacttctgctggagaaatattttacaaaccatatatattgaagcctaaactctggtttattggtaaaggagtagcactgatactagaattttgtgatcaatatgttgggataagaagtcagaagacttagatctgtgttctttttctcctgctggctataggttgttttaatctctgagctgcaatttcctcatctatagaataggttagaccagattagtggtcttcaactttggctgtatattagaatcatcttactcttgaacatttaaattagaaatttcaggccaggtgcagtggttcacgcctgtaatcctagtattttgggaggcagatatgggcggatcatgaggtcatgagatggagaacatcctggccaacatggtgaaaccccatctctactaaaaatacaaaaattagctgggcatggtggtgcacacctgtagtcctagctactcgggaggctgaggcaggagaatcgcttgaacctgggaggcggaggttgcagtgagccgagatcgtgccactgcactgcagcctggtgacagagcaagactccgtctcaaaataaataaataaatgaattaaaattaaaattagaaatttccctgggtgaggaggaaggcagaggtatttttaaagctctcaggtgatacaattctgttttaaggtaggactaaaaatcatgggactacgtcagaagttctaattagaaatctacaggttagttttctccgggcatgtgtatagtgcttaaatgtcttttaaatttgttaccaacatagagaaaaaaaagatttctagtttcccttgaaaaatggaaatattaggcaacagttgggcttatgtttctgagtggtaaaaattaaacaaagtaaacgagtctccatttcatttgttcctgttgccttcctggctcttgaaggcattgtcatttgtgaaaactaaactagatggtctttaaagtctccaattatttgaattgcttatttccacagccagaaaagagatggtaaacaaactatacctttatctataagctagttggtttgtgaaatcaaaagggacttaatctttgaatatggaaaaatcccagcttccagtggaagaggaactccatctcattaatagcaggactccacagactgctatagaatagacacccacctggggctaagagggagggaggcggaagaggacttaattcattttctggggatttttaatgaagctttcccctctttcattatttcttatttgggagcttgatcattagttgggatgtgactggctttccctagggagcaaaaaggagattagcagaggttttgctcgcttcttcctgtgatttactgtgggaagcctcccaggttcttcccttcgcttctctatgaccttcatctttatggtttcttgctgtgtctctctgagagcaagtacctgggtgaaaaaggctgagtgtgtggtttattggcaactgcctggcattggatttaagtgggtatatttgaattactagaattttacgttttataggttcaaaatatgcacttgaattttgtaggacctcttacccaaattgaataatcctttgtgccttgttaaattttaaacagtcacactatcaacattatgacatatggtatatatgatggcaataataaaaataacacttattgtccactttaatgtgctaacagtgttccaagtgatttgcataaatgtcaaatttgttccacacaattatcctatgaactaaatgttattgtttcctggtttataggtgaggaacacagaggctcaaagcagctatttggtttctcttatttcaaaattaggggaagtgagatacattaacctgtataaccagaccttgttaactgtttttggtaaattccaatgtgtattgattttcacaaagacaaagcacaccactgttatattaaatattaattttttcatagtccctcaaggtgcttactggctatattgttactgtcttttgatgttgtttatacatggtggattacagaattccatgaacatgaaaaatcttgactttatcctagcttattacctattcttaccccctgcaaagtaaaaagttcacaatagcattagtaagccaagcaaactacttattagccacatgaacttactagcctctctgcctccgtttccttgttgggaaaatggacaatacctaactcaactcataaggatatttctagaatcaggtgtaatatcaaataaaaatatatttcatttttcctagaagatacccatgtatatcttaggtactgatgcattcatagtgatgcaggacatacaatgtttattcttttccttagcaacaactatccatggagatttttccactttagagatttaattccattaaaggtttttagattgattggacaatgagaatgtttttgtctctctgaaactgaggctgaaagttgatttcattctcacacttgttcccagcaaaggctccttccatgctatcaccatctaactgctgccaggctcttttcagtgtagatggacaacacgatggattaatttctcttgctgaagtcatttctactcttcattgccgaaaggttgcttatttgtgtgctcagcttcttgaataagttggcacattcagtggatctccccttgtatagctcatactcacttgtcagtaaaagatttgttgtgtgcaggaagggagttggggggacaatagctcctgcctgctaagcaatctaaattatgagttgagcctttcattcattgctttatatgtggctgtatgcttgctattaactaatttttgctgtttatgggaaaaatagttgccttttgaaaagaaaaaactgaaaagaggcatccatattcttctcaggtcttagtccatgggtgagtgggtgtgtgcataaacatatctatatacatgtgcatggaaatatacatttatatacatgtggtatatgtgcatacttagtgtaactaatgctatatataattcatgtggcaaattcaataaggacaacagtaacaaaaaggccagggaatgtaatcttctcccctgaatacttcaggtgcccaagaaacttatttgtctttcatattgtggagtaaataaagttttattttaaagcaactttctcagatcttttaaaaaaatgtttttaggtacagggtcttgctctattgcccaggctagagtgcagtggcatgatcatgactcattgcagcctggaactcctgagctcaagtgatcctcctatctcagcctcccaagtagcagggactacaggtgcaagccactgtatctgtctaatttttttcatattttttggacatgggatctggctatgttgcccaggctggccttaaactcttggggtcaaacaatccttctgcttctgcctcccaagtacctgggattacaggcatgagccactcagatccctttgtgtggcacgtataaaaccaatattttaaaactcagagcaatcttttttaatccttggagtaaccttatgaagatagtaaataacaaatgctctgagatctataatctctactactttaaagatttatttaaaattttatgaatttttattttcataattagtattttatatagttatagtaaatggtattttataaatatataaatacattaatgtttttaaaatttattttggagttttatgttggcttcaagataatgttaagtcttttaagggttacttattaatacaattttcagcttttatttgttcaaactcaagtaatgaaaatttctgcttaaaggagaaggttttacttccagcctcttcaggattaacttgaaagaaaatgtcgttaaactaaaaaaactatacatattacaccaccaaatacctgctttctggcactaataaattagttttttgaatgcgtccaccttagtaatgaattatctgcttgcatatacttctgttttaaaggatagataccatttgttacctgtgtttcagtcacagatttttactaaactttgctccctggtataaaacacagaatgggaatttgcagtataattgtgaaaaaactccatttgtttcctatattaagagcctataagcaaggtagagatggttaactgaggaagttgaatgataacatccaagctaagagccagttcaagaatacaatcccattctcaatagccacagacagaataaaatacctaggaatacagctaatcaaggaggggaaagacctctacaacaataattataaaacgttgttcagagaaatcagagatggcacaaaaaaatagaaaaacattccatgctaatggataggaagaatcaatattgtgaaaatagccatactgcccaaagcaatttacagaatcagtgtatgtcaaactaccaatgacattctccacagaggcagacaaaaactgtttaaaaatttatactgaaccaaaggaaagctcaaatagccaaggcaacccaaagcaaaaacaacaaagctggtggcatcattttatctgacttcaaatcatactataaggctacagtaaccaaaacagcatgtcgctggcacaaaaacagacacatagacaaatgaaacagattagagagcccagaaataatgccacacacctacaacaatctgatctttgataaagctgacaaaaacaagaaatggggaaggactctctattcaataaatggggctgggaagctagctagccatatgcaggagattgaagctggacccctccttacaccatataaaaaaatcaacttgagatacattataaacttaaatgtaaaacctaaaactataaaaaaaaccctggaagataacctaggaaatgacattctcgacataggacctggcaaagatttcatgacaaagatgtcaaaagcaattgcaacaaaaacaaaaattgacaaatggaaagtaattaaactaaagagcttctgcacagcaaaagatctatcaacagagtaaacagcctacaggatgtgagaaaatatttgcaaactacacatctgacaaaagtctggtattcagaatccataacaaacttgaacaaatcaacaagcaaaaaacaacccaattaaaaagtgagcaaagaacattagtagacatttttcaaaggaagacatacatgtggccaacaagcagatgaaaaaatgctcagtatcactaatcattatggaaatgcaaatcaaaaccacaatgagataccatctcacaagtcagaatggctattatcaaaaaaaaaatgaaaagcagttgcttgtgaggttgtagagaaaagggaatgcttataaactgctggtgggaatgtaaattgttcagcaattgtgataaacagtttggtagtttctcaaagaactcaaagtagaattaccattagacccaacaatcccattattggacataaactcaaaggaatataaatcattttaccataaagacacatgcatatatattttcattgtggtactatgacagagacacaataacaaagacatagaatcaaactaaatgtccatcaatagtagactggataaagaaaacgtgatacatatataccatggaataccacgcaaccataaaaagaaatgagatcatgtcatttgcagcaacatggatgaagctggaggccattatcgtaagtggactaacacaggaacagaaaaccaaatacaacatgttctcatttataagtggaagctaaacattgagtacatatggaaacaagagaacagcagacactggggcctactcaagggtagagggagggaagagaatgaggattttaaaactacctattagatactatgcttattacctgagtggcaaaataatctgtacaccatacccctctgacatgccatttgcctatataacaaacctgcatagtactcctgaacttaaaagttaaaagaaaaaacgaaagattaatgagtgtgatactggaacaatattatgatgcaggacaattttttgtgtgtttgctagctgggcttgagatttgataagtaagtccgattatcctaatccactagtgatgatgttctaggctttgaaattcaaactactactactccactttgagagagactgcatgagaattggacccagcctggggctttagacaccatagttcaaatcttggctcttatcattttttagtcacgtgttgtgcactgaatgtttgtgtttcccagctccccaaattcataggttgaagccctaacctccaatgtggctgaatttgagattagggcctgtgaggagctggtaaaagttaaatgaagtcttaaggataggtcgccaatcctatagagttggtgctcttacaagaagaggaagagacaccagagtcctctctctttgctatatgaggacatggtgagaagtggccatctgcaagctcagaagagagccctcaccaggaacttaagtgtctggcaccttgatcttggacttcccaacctccagaactgtgagaaataatttttcgttgtttaaatcacccaaactgtagtattttgttatggcagcccaagccaactaatataccatgtaagcaggttacttaaatttactaaatacgtaagttacttaaaatttcccatcctggttctaactttactagctatcacttttactagctaacacattacattttcttcaacttgccacatgctttttttgtgagttttaaatgaaattgtttaagtactttgtttatcatgctgctgacctatagtaggcacttaaagttagtttccaggaagtttggaatggatcttacttatttatgcaaatggttgactctgatggtacttgttcctctctggaaagggttcaactctcattagaatagtcctatgactgcagtaattttgtatgttaaacttatatttttatctgcagaatgttaaatctgcaaacaccatccatcaacccaaaagcaaaaaggagtgtttcctaatagttaatagttggtaggttaataggaaatctagaaaaaaaaagtttaataatgaaggctatattaatacccagtctcatttgagtgcctgtcagtaaggaaatagttatctttcattgttaatcaatgaagaccaattggcataattagggctctggtgtgttttcttcaaatggtcttctaggacctaatttaatatcattcgagaggcttaaagaggatcccatgtttccaaatgtatcttagagtcctcagctgcccaacatcccaccattaatcatgctttgcagatgaaaaattgaaggctccttgtctctgaatatctgggatatgcttttattcctaggatgaacttctccttctttgccaataaggaagaaaaagggactgaggtgatttataagagcagttctagtgagtgaaatatgggtcctagcaaaggaggacacagctgccccttgtaatagtggagggaaggaaggaggcaggctggcagtactttgccctcctcaaccccaaaccctatctgtttaccacagtggaccttttttctgaactctgacctcattatttcattcattatccacataatattcatcaatgttctccaaggcttttagaataaatctttaacgtttctccaaaagtcacaaggtctgacacctgccttccattttccagcttcatatcataatcctcctttttggcagtggccacactgatcatcttccaggtccacaaactcagcatttgctcattgtgaaccccttacatcatgactgtcagcccaattgtcatttccttggggaggccttccctgaaccctgggagtggatcatattcccctatcatgtgctttcatagcaccatgaatgtctccttggtggcagtccccagcaggagaattctgtgtttatctgtatgactgtttcataaatgtttgtcttcctcccaatagtctgtcagcactttgggagccagttgtgttttgctcttgattctacctccagcacaggatgtctcttagtatttatggaaggggacatgaaaaaagaaaaagtccactgcatgaagatttaatccagtgagactgaggcctgaacatctagctttagggaagccagctgctagcaggacagactggtaggcactaggtgaggagaatggaaaaacacagggaaagagcatcattttctttattattttgcctctgacagacccctccaagtaacagattccaaagagattgtgaacattctccctctggtatggagtctcctgtcctgtcagaaatatggtacccagaggccaaagctgctgcataagcaagttgtcatgaaactattccaggacaggtttcagaagtagggtcttaaaaatgagtattaaatctaatgttcacccagatacatttccaacccacatatagacaccgaatttagcaatgaaaatggatgctactctgttaaggatttatttgaaatgttggttttctctcgtccatctgatacagatcatagctctgtttctgtcattagattgattttcatgtttctcaacacagactctcagagataagtttaatttttcagcatggccataggaatgatgaagtcattcctcattaagatgaagttaagcaaaatttaataatacttgtttaggattccttatttacttttctacacaaaaagagttgcaaggggaaaacaaaaactttaggtttgagtaacttccttaattcaaatatagatttaaaccactttgtcataatatgcaaatgaactattgcttttttccccacaggtctgttttcaaatagataatgagattatataaataattaccttatataaacttaaggttactcattattgaaagcaatcttctttttttgtttctggtttattatggtttaagagtgagtctttgttttagatacttgaaaacaaagtgtgtgtgtgcgtgtgcatgtgtatgtgtgtggatatatacatctagggaggtcgtcaaattcaaaaattataatacaatgttgtaatgtcagcacttcctattgcatagttttataatggggatatatagctatgcattaaaatgcattactgaaatggaaaatcaggatgtgttaaaaatgaattagtaattatattaagatctgaatgggaactagcatacaatctaacttaagtttttgaaaaataaaaaaatccagaaaataattaatgataagttagtttcagtattacactgataaatatttcaagaataagctataaaaaatgaggtagatttattattttaaggttcatactaaaagattataatatttatttaactttatttaatttagaataagattactgtcatctctctaagcatttatgtaataatgtattatttacttttccattaaatattactgagataaataaggagtcgtggtgaatgaaatataatttaataagcagggttttcttaggtgaaaactagtcatgtcctgctataaatgtatattgagagagaagctgaatagaccagctccatgatttagtcaatgacatgacttcagggaaaatgtttttatgccttattggccatatcttttaatacttgcattgaaaataaaattacatcccaagattatgagggttgtgaaattttataattagatatttaagtcctaaattgattagcagcagtataaacatagaaatggattttgggttaaatctgagaactattttcttatgctaaaatttgcatgcagatgacaataggaaaatcaaatgttttcctggaaaattttcaaatgggacaaatagtcgtctttctggaaatatgaaataaagggagtggtagtggttggactataaacctttttgaaggccttttaatctttagctgtaattcatgttttatcatcattgaattttaaaaacagaaaataccttagaaataatttagtgttaccctgttgatactaccaaaaaaaaaaaaaaaaaaaaaaaaacagtgctcagagtcacataacttgattcagtcagagctggtgctagatgcttagtcttctgacttctaattcagtttgctttcattatctactacctgctgctgactcagagctcctcagctatctgcaagtggatgtgtttattgagcatttacgatgtacatgtactactctcaatgcgaaggatgtaatggtgaatgggagcttactttctgactcaaatattagttttctctctttgtgttccaaatgaaagtgtccttttgctttatctgaagcaggaagttgtaagtttgcttattttacttttgaaattttagagaattggcagtggggtcatgccatcagaaacacatacatgcaatgcatggatgcactgtgtgaatgagctctctggaaggtggtagattatgggaaagaaggaagctcagaaagagagtgaaccaagtcaagaggaaagagagaagaaacaggcaagtgtggagcagaggaaaagtaggagggtcatgaatccattctgcaggtgtgtgctgagagactggaagaaggaaaagaaccaaggaagtctctgccatgttatcttagttttgttaagggtataaagagattgaagagggtttaactaggccatccttaaccctaggtaatccctagagtccttagcagaactaataatctaaattacgaatgtctgtgtgtgcacacacacagaatgcacttgctaatgtctatcattatgagtatcttctgtcttctccactacaaggaaaggaagggaatgtgaccctctttcctgattagaagtaactagggcatagtaacacaaatggatgaattaaactgtttgaaatggtgcactggaatatatttattttggggtaaatcatgaagaaatgaaaaaggaagagattctcttttgagaaaaagtttgtttcctattgtcaattgagcaactctgtgaacattctaaagataaagaatgattattctgtaaagtgctgggatttctggtgctgtgtgacaaagttcggttccttttgtctaagttagttataataatctttaatgaaaagcagaggggtcccctggtttggaacaagtacctgagtcaagagttgacaagtggaatagctgggcccagaggattctgtcgagttgacaaagccagaacagtacatttggacagaaagtttgattttcttatactgaatgtgatgatcttgaagaacagattttttttttttttgcatgaaaataaatctttattttcagttattacccaccagtaagagaaagttaggttaagggtataaagggattgaagaggtttctacttttgcccggtccttagtttgaatagccttccactcatccaaaatcatctcttttggaccctcctctttcacctcttcaacttcattctctttattttcagtgtctgccactggatgatgttcttcacattcaagtgtttcctcagtcacatttgattgatccaagtcactgcaattacaagatatttgtttctgaatgtatttgggggactctgttaattcatctttgacaattccccaattgtgagatccgctacctccatgttacaggtccttgtgcttcaggccactgtaatgtgaaaaacaagatctatcacttccactatacctatcaaattcatgtttgccgtgagaatcaaatccatctccttgacccattgcacgtccactgccctctcaacctcttccaagaccaccacgacctcaaataggtcagtcaataattggtctatcaactgaaaattcacctccttcaaccttttcttcaagtggcttttcaaatctttgttcacaaggtggtctcctttctggtcttctatcaattattttcccttcaccctgaagttgttgatcaggtcttcttccaacttgtcttattccttcttctttttttcttttttttttctttttcctctaggcaagctttattcttcgattcctctatccaggaagggggctgttggttgcattttacccaaatggaatgtgatgggaattgggagcttgagttgtttggagaaggagttgtcaatcctagcaaatgtctatagctggtgtgtggtgtccatcaattcttgagggcttggccatgcagactagggaatggtcagaacagagtcattcagaggtctccagagctttacaatatcaaggttcagggggtatagacagtaaggaaaaaggccatttcctatttctgtccatttttggtacagtagacagttaaggttttttcttttgactagcttttaaaaaattacttaggaaatggaaagcttataaacattcataagtgaattgttgaattgtaaccccaagtggtttccttacctagtcaccacttaaccagaaatattagaatacacggttcaacctgaattcaaccagggggataacctgcctgttgctcaagcagtcatcagagtttttaaaaacaaaattaagcaaaaaagacctttccccaaatacaatcattactacttagctttgtatgatccattcctaagaaagtcacattccatttcagaaaacatgactgcttaaggttcagttaaagtccttgccttcaggtgcttacttttagttttctttaaattaacttctgaaatgtttatcttatgttttgtgctgcattcctgaaaactgtaacctttaaggacgtaggcctcatctttataaaggaggaagaaaacaacaaggaggtgtctcatttgggaggcggaaggttatgaccaatgctggaagtcttcctcttccttacttgttattcaacaagatgggttctgtggtgtcgcatgaggtatgagttggaaatgaaagctacaccacacttcttacattcatagggcttctccccagtgtgggtgttctggtgcacggtgaggctcaacttctgtctgaaggccttcccacactcattacacgtgtaaggtttttctccattatggattctctgttgaataagtaggtatgagctacatgtgaaggccttcccacattcattacacacaaaaggaagatctccactgtgaattctctggtggacaaaaaggcaagagagctgactgaaggttttcccacattcgctgcagtcataagatttctgtgcagtgtgaattctctggtgcataataaggtgtgaaaaataactaaaggttttcccatactcttttcactcatatggcttctcaccagtatggcttcactgatgtacaataagatttgcactctcggtaaatgctttgccacaatcgttacaggcagagggcttctccccagtgtggatcctctggtggacaatatggtttgagctcccagtaaatattttccaacactcattacatttacagcattttctgtaatgtggactttctggtgccaagcaagttgtgagctataactaaaggtttatagttaaacctttcactgcacttaagggttttttctaaggagtggattttttgatgtatggtcagatttgaactctgagtgaaggctttcccacattttgagcaaatataaggtttctgtccagtgtggattctctgatgcacatcgaggtttgcactgtgaatgaaggccttcccacactcatgacattcaaaaggtttctccccagtgtggattctctgatgcacaatgaggtttgcactctgactaaatcctttcccacatgcactacaatgtaaaagactttcacccaggctgggtttttggatttttaacagtgtcagaattaagggtgtattttcccccagatttcttacatttctgatcttcctcttctttgaaactttcaggtaagtgacagtcattcactatcacttatctgaaatctttcatttcactccttattctctgcctctttaacatgttttctttttcacaagcttgtcttaactcaggtccttaagaatcagctttctggattttccgaatatgatgaggggattttcagcttcctcacatatttcagtttttggaaccagtaactgaaggttcttggtttcagcaccctttcttcctcttctgattcaccagtctgacgaccctcccctgggatctagacttccatgttttcagagtgcacttgttggctgggtacctgacctgggaagttttcttcttcctcctcctcctttttcaccttcaatgggccccgtagggctagggccatggcttctctcaattctgcagtcatctctgcttagcaggggaacgcctatagctgggagctgcccagcagaggtcaaaccccatctaagctttatgtttcaaaagcttcttcttgagtttcttcccagggccaagatgagtactgcctatgtgggcagctgagaggcgcgacctgagttcactggctctgcagcaggaggctgagggaccgggacctcagcgcctactggcacgagaacgatgacccatattccttctttcttaagcgccagaggcggctgcatctcctctttcttgtcaaccgcgccacgctggggtggcaacggattcttgcggtctttctggggctccttgcgcagctagctatttgcctgcccccttggagttggtctgggccgcagcctgagctgccgttcttggccccagggcccccaatgccgcccctgccagcttgctttttcttgttctccgctgccttcagcacctcgaaggggtccgattcgttgtcaaataactggtccaatcggttgatgaccgcgcaactgaagccttcctgtaagtgcccaggcatgatgattgctcggcggcacattcctccacggattgcagcgggctgcgcggagccaagagcgcctgcttcagctcatcccacaagatcaaagagcaaatttttaaaaatttgccagtaaatgtcaggcaaggtaaatttcaaaatgaatttttaacgtctctaaaatggagttatgtttgattatgagtttatgacgaattaaaagatagttctagatattattctagaaagcttcttgttctgggaaagagagagagtttggaaacttgagataagacctttattgtctattttattatttactgctaacaaactgcattttctcactgttcattggaataggtgggttcagggaacttaagaaagcctaatgggaagtgggaaaagtaaattatttcgtatatttttatgtgtacaaacagttgataaaggaggaagtgtagtggtggggtggatcatgcatattgggatagaagagatagtataattattaacaattatactggacattttggattaagtcctccaaattttcttatttgtgagggtacaagtcactatttacactatggtaagctgcatgcaaatatctgagtacctttctgttcctaccttcagctgggccagcactaagctgaaatagcctatacttagatgtttttctgaggaagtacgtttttccttttccctcagattcctggtgcctggtatagcacttttttgatttgctcttgttctggcaataggtcaactggctctcatggtccttaacatttcaggtaaataattccaacagttgtgactggaaggaatccaaatcaactcaaggcatccactctatgttcaaaatgccatgttttgagtgatttgtcctttggttagtaactttcaaaaatatgaggactggaaggaaaagatactatttgaggaactaatggaaaagcaagcagtttttgatacactaagatattcccttatgatacaaggagtgtgatcattgactttcctacttacctaaacattatgctgtcagagcatgtggataggcctagtggttaacacacatagaaaattcagactgcctagttcaattcccagcttcatcatttgctagctatataatctttagtaaattagttaactttcctgtgcctcagtctggttttcctgaagattaaatgaatttatatttcttaagtgcctagaactgtagctgatctgtaacaagtactgtatgtttttgtttaaataataaataaaatgaccggattgttcagatggaaaaacaggggtcttaggcggcttaggattttctgtaaagtaacagaatcatttgatggcagaaacaacgatattatcactgtccagaaccctaatggagaactatagctcttaagggtgatgtggggagaaatacactgatgaaagacaatcaacattattagacaagatgggagagagtgggaactagtcattcatttatctaatggcttagtcagcaagtaactatttaatgcctactttgggccttgacactataccaacattgtgcaggaagtgattaaaattcataagaacattcacttaggctgggataaacaagaggtcttttgcaaaatctgatgatgagctttttgatgttgagttgacaaactctgcagcaggtcagtggtggggggaaattatcataaaattccatcccttaaacatctacaggaagatgattattttaagatgctttacttctggagatgtatgctttacttcctcttagagaatctggcttatgttctcatgttctggttttatatgtaattggtcatgagcttaatttgatccaagcatttggcacagttacccccagaagttaactcatttgtggactgtataaacgctattgcacaaaaaagaagtatatatatacaaatagtcataatagaccacatctcggttaatagctttaagtctagatgaaatgttttaagaaggatattgacaaattagagaacattagaagcatttgccagaatagtgacatggcaagaaattatgccaaatagtagaaagagaattagacgcctaagtggaacatggtatataacccataagaatttgagggattgtcattggtagaataagatgttattcttggctgcttccagctgaggagtggtggatgggtgactaaggcctataagagagcaaatataaggaagagtttctaaatgctaaagtcaatttccaaagaaacagcctggcctctaagggaaagagcttcttgtcagtagatgtgtttaggtggggccagctgaacaagctcctgagctctggggattagactccatctgctggataggaggtacaactaagtcgtctcagaggttccctgtgttccaagattctgttactctgtgatttcatgactttgatgtcacctcccttaggttggttacgctaaataatgttaaaagtcagtgtatgccttaagattgggtgaattgctatgacgcaatgatttttaccagataagcggctgagtctaagaatgaaactactgtttctaagtgaaagaggtatgaaaacctaaagataatatttttctctgtagatagaaagaatttgtattataggtctgtgttggaagtatagcagggcatcaccagaattcaccctaactgggtgaattcacggcagtaatcagtggaatgtgtagtttgacaatgaggccttatcatttctaagtagtttctttttttttctttctttctttttgagacagagtctcacactgttgcccagagctttgccctggaactcttggagtccaatggcgtgatctcgtgtccctgcagcctctgtctcccaggttcaaatgaaactcttgactcagattcccgatttctaagtggagagttatgaatggcccaaagataatatttttctctatagatagaaataatttgtatctacgtctgtgttggatatatagcagggcattaccagaattcaacctaactcggtgaattcatggcagtgaacactgcaatatgtggtttaataatgaggccttattcttaaggcaaagctcagaaaagctgataagcaaattagaaaggtctattgaaaagtgtctgtctggccgggtgtggtggctcatgcctgtaatcctagcactttgggagcccaagttgggtggatcacttgaggtctggagttcaaaaccagcttggccaacatggcaaaaccccatctctactaaaaatacaaaaaattaacagggcgtggtggtgcacacctgtaatcccagctacttgggaggctgaggcaggagaatcgcttgaacccgggaagcagaggttgtagtgagccaagatcgtgccgcagcactccagcctgggcgacagaacaagactcagtctcccaaaaaaacaaacaggcaacagaacaagactgagtctctcaaacaaacaaaacaaaacaaaaaaacaaaaaaaagaagagtgtctgtctgccaacctgcttccacgaaggcccttcttctgattgtagaagtgcctggtttaggatggcagtgtgctctacctgctgtctggtgagtagtcaggattggacttctgtaagacactctgtatgagaggcttgccaataccttcagaatcaggcagaggtctttggcgagttatttctgaatgaagcatatctgcgtgtctgtctgatctaagcctgggaaccacgagggaagatactgtttaagcaacaacagcaaaaaaaaggcagggaacttaagagagacatggattttagtcactaagaacatgaagaggaacattttgataatatgtactctattttataaaacctgtagctataggaacatatatttgcctacaatatattttttttcttttttcacccttgatttttaactattttctacaacagtttttctttttttttttttttttgcccttgatattttttcttttcttttctttttttttttttttttgagacagagtcttgctctgtcacccaggctggagtgcagtggtgcgatctcagctcattgcaactccctcctcctgggtttaagtgattctcctgcctcagcctcctgagtagtagcttggattataggcacccgccaccacacctggctaatttttgtatttgtagtagagacggggtttcaccatgttggccaggctggtctggaactcctgacctcaagtgatctgcccacctcagcctcccaaagttctgagattacaggcatgagccactgtgcctggcctgcctttgatttttaactattcctcatgtgaaaatttaagtctttctatgggttaaagggaaccggtaaagagcattggatttatgcttgagctggaatttccctctaggtttggatatagtgaaggcagtggagatttgggtttataacagacgcagatttgtgaagctataaaatctgaagcctcaaggcccctcacttgcagagactccttccagggtcctggaagggaccctactaatgtgttattatggtcattattttataaaaattgtaaaacgtaatgtgtttcagccatgatttgttaaaattattgtcttcttccaattcaactttccctcctttgtccttccctttccagttgggtggcattaaagtggccatgcacgttttgtatttgtaattgtgcatttttttgtcttaaaaaggacccccaaccaaattgtataagtttcaggccctgaaaacatgggtcttccactgggtataggaatgaaataagtaacaatctggaaattgcctgtgtagcagaatcagccaaaagtcagagtcagcaatcaaaatgttgtgacgtggtgagtgagagtaaattcgaatccgtaatcccaacagcatttgacagtgggaaaatggggcttttttctcccctctttagggttcattttaaagaagaattccatgcaaagggtgtcatgaattgagaaatatacatcagattatatatataatatatattttttgtttgtttgtttgttttgagacggaatctcgctctgtcacctaggctggagtacagtggtgcgatctcggctcactgcaagctctgcctcctgggttcacgccattctcctgcctcagcctccctagtagctgggactacaggcgcccgccacctagcccggctagttttttgtattttttagtagagacggggtttcacagtgttagccaggatgatctggatctcctgacctcgtgatccgcccacctcagcctcccaaagtgctgggattacaggtgtgacacaccatgcctggcttttttttttttttttttttttttgagatggagtccctctcagtcgcccaggctggagtgcagtggcgcgatctcagcttactgcgatctcaactcactgcaacctctgctccagggttcaagtgatttccctgcctcagcttcccaggtagctgggattacaggttggtgccaccatgcctggctaattttttatattttagtagagacagggtttcaccattttgaccaggatggtctccatctcctgaccttgtgatctgcctgtcttggccttccaaagtgctgggatggcaggtgtgagccactgcacctggcctaacttatttttaaaaatagcaaattctttaaaataatgcaaattggtgatgaattatgaaaatcatgatgagaaactcctaactgaagagagaaattgtttgaaaactgtattctccttttcctctactactttatgtaattataaagcctttctctaaagttcctttctgacagagaaatactggccaacagaaattcaacggaaatttgagatttttgacattcaggcaatttatatggtgtttcaggtgttactacctctaatagtctatcaataaaaccctgataggggatggtctctcttttttgccttctactccatctcttctcgcacacccttgtgattgttgctagcattcacacttactctctctttatttatttattttttgagacagggtctcactttgtcacccaggctgtagtgcagtggcgcgatctcagctcactgcagcctccacctctggagctcaagggattcgagtagctaggactacaggcgtgtatcaccacccctggctaatttttgtattttttgtagagctggggttttgacatgttgcccaggctggtctccaacacctgggatcaagcagtctgcccaccttggcctcccaaagtgctgaaattacaggtatgagcctccattgctgggcacttactctctttttaattatcagcttgcaaatgagaaatctgcccaaggagcctgagcttggtgcatacaagttcatttcagccccatcggtgagtttatgattctatgagacattaaagatatattttatttggacatgttaaaaaaaaaactgtatgtttcttcacaacatccaaagtaattattttattggtgttgataattattattgaggaatagggtaatcatgcgtgttatcaaccatttcctaaatggtacctagttaacatgttaggggagggaatctaatctgaaagtgatgcccatttagtgaagccaagtgatgtagcaagagttgagaacaacttataaagggacctcttagcccatgtccagaacattgtcattaacataaagataggctgccaagggaaaggacaactgtatggtcagtttacccagatctgaactctcaaaaatcaagcactctcattctgttagggtgatgtcagagaaaataaccttcacaaggtttgaaaacacagttgtaacatactgggctatgttccagggctagcattggctcagatttttatcttgtgcttagaaccagcctactgttgtctctgcagagagaacactaagtaggtacttaataatactttgctggccagcacatagctctgtgcagaacgaacactaagtaggtacttaataatgcttgcaggccagcacatggatggatcatgtttataagtgtgtatcgtaaacactttgccttcaggaaattgtttcctttttagagttttcatactgtggacatccttaaaaatcccagaaaatgtatctttatggattgacatgtgactcctacatgttaagttagaatccaatgaaatgctgttctttgggctaaactttcaagactcatgtgtgtggtgtataattcattaactaaagatatgattcatactttaccttatgtaggaccacaggtatccacatatccaccattaggatattcttcaaatctcatagtttggaagattttcagacattgtaaacagtaaatgcatcagaaataagcattttccagaagagggaggtatgaaatagtgattgatcagcctgttgcttagtcctggaaatgtgaaatcagatcaatacgaaaaagatgctttccttgcattctcttccagaaatatgcagcctgctgctcttttgtcttcagtgtaatcatgctgcagtgaggagagcccagaactgtttttaaattcaaaaggacaattgctttctgctcactcaggtccactgaggcatgctccaagacaggaaaaaggtgcttagcaggatctctttgctagagattcaatatgtgaattttactttgagaataaaaagttcacccacttttaaaaggttaatcaaaagcacattgtagtgtattcttcctttcctatgcaatttcctatggaatctatttaaattctggctgcagagcagcaatatttttcaaagaggcagtccttctgccaagtggctctagaagtacccataatctccatgtcagaagtatggaaaatgaaagagatgaacacttccttcagaaattgtacctttgattcctttactttacagccaggcaggaagaatcctgagagaggcctttaccgaaagttcaatatttatgagctacatactgacaaatgaaaaatgattcctagccctgagttgcttaccctatcaagtttgcccattattttcaggctgttgagcattgtttgaaaaatcgatctgggagctacctgagtctatccattaccatggtcttgctgttataaattcacactgggttatttctattccctaagtttgctctgccctttcctaccctttacctttatggtcttccatctggtaaattttctctcacccttcctggtctagctgtccttcgtcttcacttatgaaggcttccttgttttcctttttcagaattaattgctaatttctcactgctctctaagcattaatacacccatcatagccttcatcataatatgctttgtactgtagttatttatgtacttatttgtttttccccttctttgttcttcagttaaatgcatgccagatccaactttacagatgggaaaaatgagctctgaagtttaataacttgcccaaggctacccagttagaagagttatggacttcactctgaatatggtgacttttgttctcgtgtgttgccttctttagtcttcttaagaaaaaccttgtcttgttttcttttctccttaggttgacttattctatacattagaagtttctaaattataatcaaactggcattccaaggtcatagccatatgtaaatcagaatgcagttttacatagattcattattactgtgcgtggagattagaagccagctcacaagaagacttaatttggaaagataaggtaaccaactttacatgagtgctagcctttcattgatttctcacctccattctatattcctcctggcacttgttttaaatctgttctactgaagtccatactctacccccttgctctcagccgatgatctgtttacctgctctgagaagatttagatcagtagttctcaaactttaatatgtataaaaatcacatgcagagctctttctaacatagtttcctgggccttttcccaggaattctgattcagtaggtcagggtggggctcatgagtgctccgttctaacaagctcccaggtgatggcaacacagctggtctgaggactacactttgagaacctctgatttaggccatcctctgagataggatgtcttcttccatacgtcttctctggatgtttatccttcctctccttctgtgagtgagaattcagtcattctattctcaggctgaaccctctcaccacaagcttttatcccatctcacttcatctatttcaggaccttgcttccacttgtctctctttgcatcttttatgtcaccctctcaattgccttttattctcccctgctttactaataaaactgttcctttctcagttgtactgttttagatacatctaatgattgtaagcaaaattattttctataagaatgcttgacaatttcagattcaactcagttggctaggaactaagtttctgtaatttgggaattgacttgtagagagcaaaattaagaaaccaagtttaactttttttaatggatgtgagtggaagagactaatgagatactacaaaagagttaacttcttacatttctgtagtctaatacgagatagtttctccaggaattaacatagcacatctggttcactgacctgagtttgtttcctggtgaggctttgcagtatcatccatatctcaggcaaaggtattccagcattttgtagttaagcagttggaggaggagtagggagaacttgtgtactttgaaacatttcacaatgaactactttgcattctaatgatgttctccttacttaaggactttgctatgtaaagatgctttgtccttctgataatcacttacacttttcttctgtgttcatatcacttcattaatcctggttacttgtaatgaatcataatcttacccacttattcttgtgtgactcattcctacttgtattctttttttttttttaatttatttattattattatactttaagttgtagggtacatgtgcataacgtgcaggtttgttacatatgtatacttgtgccatgttggtaatagttgtctgtgtctgataacacattgtcaattgactatgctatttttaatgtaagccttggcaaaaaggtttacttagagaaaagctgtacatttaattcccccatgcctcagttcccaaatttactaataaagattatacttagctgtcactccacatttcatcagtagaattaaaatgaatagagattatgaaataagacaacaaaaaagatataattataatggaccagaatgagaaatcactacagatcaatgcaaatgacctgccatgtcagattcctagatgcagtttctttagtcagtgggccatatttcttcctcattctttgtttttccatcatgccttccaaaactaaattttaaccaagaaggaaatatcatttgtcttctgatataggaagatcctactgagagattatattcgtatatttcatccatcggcctataggtggaattgtatttaaaatactaataaaggttattattgcttatatctctaaaaatgctccaactctccaaataaggcttatattgttgatgatatttatcagtggctctgaacacttgcatatcataaaactctccctcaaaatttaaccttaaactctttcaggcttgtcttcatcacagtgggaactgaggacagctgctcatgttttttgatagaacagctcttaacatgcttttgctcttgcctcccactgcccaacaccagctgcgtacacacactccacttgctgtgtgcatgctctggctcctggctccttttccttcagctaagttagcctggttttatttggtttcatcatacgaagtatctattagtaaaacttttatgaactctgattatagtactaaactcacaataaagtaatcagaacttcatttattaaaacactgggctgagcttattttttaatttagtatgcatgacaattttgtaaggtaggaattttcattccccttttatagatgggaaaactgaggtccagggtgtaggtaacattttcaaagttaactcagaagtaaatggcttagctgtaatttgaacccaggttcctacaattctaaagcccacccttttaactgctgtgcacacaattactgtgttcttacttgctctctgaaatacaacaccttattctcatttcatctgctctttctgccctatacacttcggtttctgctctgtagatacctgctgtggattgtgacatctcaattttttttgtaccttggcagggttttgattgatgtattggtgttccgaactctttagcatatatattaatatggaagacctaccaaatatttcatctaatagggattattttgtctacctatttcatctttctttataatgtaagtttgtagaaggaagaaactataaattgctcaattagggactccacagtgagccaagcgcatacatacttgacccagagaagtcatcgccatctttatcaccacagctaacatatgggtagtgctcaccatctaccaaatatgtgcatggattattttatttactctttacagtaaccccataaagtagattatgttgccatcccaaggttaaaaaactagtccacgttcatcgagttactgcatgatagagttcgagcctaaccaacaccaatctatccacgcatctgtccacacagttaactactccacacttctcagtggaatctacagttccatgtatttcgtattccttccatttttcactatctgtcctcttcgccatcttagcctgtttctctccttttcactttctgccctatgcatacctgctcaatcttcagtcttctctgccttaccttctctttctcaattttgttctcgttctgtcctatcctgcctccccactcttcttatctcattttcctagtccccttgtcacctttttacctcttacatatttctttttaaaaagtaacttcaagcttgataatagattcttcaactctcttagcaatatcttatcctaaccataataaaatgataaagtgctaggtgtaaacagaagtagaatatgaaattgaagtgaagaatctctttactttttctgttagaaacgtaaataatgagtgactataacatcttggtctccataacttctaagtgttaaataaaacacatttctctttttttatttaacacacacacatccacacacacataaacttgttttatgcattgattgccatttattgagcagcataattttggaaatgcaatagctacaaaacaatttttaagttattatcatacagtgacattaataggctcatcactttgctttctttcctttgttctatcatgtagagagttgctttagagatcattgtgtattgatatgaattatcgttgaagttttattagtctggatgtctggttttgggcattttgataaatttcttttgctccaaatccagaagttatggccattcagctttataaataagacttttttaaaaaggcaaagtcataaaataaatatttcaaagcagtgttagatatagccagctgaataaactgccctttctatttaactttgaactctaaacctcatttaaatatcctcccttttttctctaaagaaggcaagaaaaaaaaaaaacaattacagtagattctaaaataaaatatagcaagaacatttttgtaagagatacctcagatagaaggctgtaataattgggcaagtatttgcacctaaccagtagaacttagaagagaaaacgtgaaatgaacttcttagcttatggaatggtgtggataggtttgcattacttagatgtttacagagctctagcatttacttactgaaacactggaatggttcatatccctgtggtttctacctcatttcttccagaaggattaggttgtatgctgccagagaccacactgactcttagtaatgggatcaccaaattctggttcacaattttgtgcatagagagattgcactaatatctcaaaattgtagctctgattataaccctggtatagaaatctgagctatgttggcagtgccatgctgtacagtcgaatccacctgattatatctgcatttgtgacagctgggctggccttcattggcatatgcctctttgctgtgcccagggctttgaatgcaaaatgaaagatcagcatgatattaggggcccatgatccatagaggtagcttcccaagtaaacagtgtctcagctttaacatggcccccaatatcctgctttatttttctggactgaagttcctatgacagatttgttgctttcaaaaagtaattttgcagatttgtccttttttaaaagaaataaaatttgcctccacttcctactgaaagtgatatggtagtatccatcttataattgcacagattcaaaaataagccacaaatatgttagctgaagtataactgtggactataaaatacagatatcatagcctataatatggagggtagtttgacgttataaagccatttttctgtgttttacattatcataaaatttaactactgaagggaaagtgaaggttttaatatttaagtaagcctagcacttaaagagaaacacacatattttccttggaaaaaaggaagttccattttggacactgcaaatgacggtgccagctgttgtcatagtatttctagcatccactgaggattaattccaggcccagcaaattcactggatgagcagaaacagccaaagaagtaaacactggtgcttctgccgtggtattattaaattacgcgggagacttctgcaaagttggatatctagtgaacgctggattatcatgcctgagcatcattcactttgtggatatctgcagaaaactgaatcccgaacttgctttcttctgcctcttggccctcttcctctgtagaggtatactcagaaaatgtgatctcatttgaatataaacttttctattaatattcattaagtactcatacaatataagctgaggaaacagtggtgggtataaaacaccagcctgatgtaaagagcttactttcactgtagaggcaagatagcataatgaaacagagatgggtttcagaggcaggtggaccagaattcaaatcctatttcttctaagtatggccttgggcccatcacttaaatttctgagactcagtttccttttctataaaaggtagatactaaccatgctacagagttctgttgagaattagaaatatttacagatacttagaccactacaagatagctctttttctagaagaggcataccttattatatataatctatgaaacagaatatggaagatgctaaatgaaaggtacaatcagagaatgccccaggccctcaagaaggaaggtggaatggatgaggaagtctgctgtccaagggatgggccggagctaaggcaagatatgtgtgtgggccttcactaactaggcacagggagagggcattccagcagcaggtgtaggtccggccaaggaattaagacaggaacgcaagtggcgttttccaggcagaagattaggaagttttagatcagcctggatacagagaccttgaatagcaagccgactgaggaatgcatggaagaatgactactagctggagtaaaacataaacctcaaggcctcttttctctttcacctttcctcttgcccacatcacggacagacagttcttgcttttccttatactctgtttctgtgagcaattttaagaaggcagagtgcataatggtattacttttatgtctgcatgtgtattgccacatgaagcctgtagttttgcttttcaaactactagattgtgaccttgtaatgatctggcaaaaggctgattgaatttataagagcagtaaattaatatagtggataatagtgggaaaaaattagtggctaatactggggaatgagaagattaggaaagacataaataaaatatgggtggtgtaaataaaacttaaagtgaaaatatggggaagggactgcttatgattcaccttacagccatgtagaaattttgattaacagagcagtgtatctgaggcatgttgtaaagaatggactggggtctgttttcactgtcgattctttctgcgagtgcatgttcatgaagatattggaggctatttttctataggcaactggtggttttctgctgtaggcagaagtagttgaggtaatcctagggaggtgacactgaatggggctgtggtcctactttatgtaaggttattatacgtgaaagaaagagtaatttttaaaagtaattaactagtggtagattatgaactaacactagcaaaggttgattataaatcagattttctttttactactgatttggaaacaatctttggagaaatagatttggaatggttaaatatcacttttgggagcacattttgctaccacagcttaacggtactcttaagagaaagctttacaaatggggcaaccttgaaagacacatttcatatgcattcaaattcaagatatgaccgaaagctctgttgccagggtaaaggttttgagagttaaatgggaatttggaaaacaatactcaaaaattgacttaaaatgcagatgcagataagcctacaagtatttaaagtgtggagacatcaaagaatgtaagaaatagtttggatcactaacaggaatgtgtaatgggaagtcaaaatctatgctgtcaggaaaaattcatattattgggtagaaactctattatttggtacatttaagataaaatgaaaattgtgttttcaaagggttaggcctcatagtggatgagtgattggggcgttttctggtttcagtgattctgtaggcagaaaacagtttttactgccaagtgtgtcagtgaagcgggggagatagagaccttactgtgttaagtgaaatctgttgcttaagaataaagctggcatttctgtagaatggagaaggaatttggtattatcatatcatcaaaaaaaaaaaaaaactgctctttgaagagtagattttttaaagtctgattatcagtatttatttaaaactactgcctaagtatttaaacagtttcaggctctgattttatttttgttaaaaaatgaaacctatgcctaaaaattattttaagtagttatatggatagatgagctacacagtttcagacctgtgtatatgactttttaagaggtctgtggtatccaataataaatgatcttatgcagggatttgacacataatgggtcatgcattatctataccttgttaatgggatctgtatagagtgatagcagaaaagaaagttaattttaggatcctttaatgcctataaatttagagcaaaagaagtatttctaaaagctcatcttttgtatacatatgcccaatcacaagttttaccgacatttttacacgttttaggcctgaagtatttgattcagctcttatttgtcaagatacaatatgattacattagtaaaatacaaaagggcggataagtttttcttcttttgcctatcttatagtcacgctgcaaagcctccatcacacttttttggctgaggtagatctagatgtatagaggccaactaatatagttttatataatcaacatagggaagtcatttcagagactggcattgagctcttggagggaagaaaatgaatcttaaagcttcttgggaatatccctcactgcagcagaggttatgtgctctaatggatgctccgtaaatgcttgagagaatataagtcccataggttagcatgtacttaattctacctaacatggaaacctctccatacattctatagctgaattattttaggagctcaaaaggagtaacaggaactaaagggaacaccagctccaagattggatttttaggctttcttgctagtgtaacacttcctttcctattggactattggcaaccatatcctggctaattggaagtgattttcaggggaaaggaagaggtcataagttcttgcctccctattttccttcttgttgggttttagtaacttaccttaagacgtagtgtcatcctattcaaactcctaatattcagaaaccgactttcattattcaaacatgttgaggaaaaaaatgtctccttgcatcctcctctgcttaaaacttctccagtaccatcaagcgtggacagatatatgacagtggcagtatccagaagacacaccatctatgtaacaaaccctagaaataaagtatggtataatcctaagcattcacttggcactgtcgcttctgggaatttgctatgagtcagccacaggcatctctgtgtaccttcaagcccagcttagcacatatgggaggataagagagaacatgtacttcttgaatacatcttctatagagtaaactaatccttagctaagttgatgatatcctcacccagaatttaaaagttcagtagagactcttcttgaaatgttgaatttttatttctgcttattgccctttatagctgggtgaaatgcagtgaagatattcactggtactataaaaatgcattggttctttttggtgagctacttgactatcagagccaaatacgtaggtagttggaattaaatttccaatttagcatcccccttagaagggtgatagaagctccaatgtcttggtgtttctgtttctgagtatctgctgtctcactgaggcaacatgctagcctccatgttgttttatttcacagacatagaactaagtgacacatctgccaattccccctcccattttctttgatggaggtagattacatttggtgtagatattgcttgaaggtacttgttgttctttcttacaagtaaacaagaaagagagcagcaaataatagctagaaggaagatatgcccacagcacattcaggccacttagtctatctagtaagtacttaagagtgtttcaggcatcaagcatgtactgggagacatgcacacagaaaaaggacaagcaatagattcctttgagagtgacatggtaggtctgaagagtgaatgtaactttttgtctccatcccctcagtgattcattaattatttattagctatttttttccaccaggattacaatcattttacatttgcttgccagcctagtgggttattaatagtggttactctatttatttacacattttctattgtacgttattcatcctttattagttcacccccacccctggtcaccattcttttttctttcgtttgacctttcatggctaccgtattatcaagtgatcaggaaaaaaatgcactggtgtcagaattaggccaacacagacatatgggatggtaggttcatttgggttgggtagagagctgtttgaaacttgtatacacatttttcaatttcaagagggaacatttacagtaaaggaagcatgatatccatagtctgcagtggtctaatggaggtgagctcaggaatctcagatgcatgtagctctacaagtctccattatacaaattatgttgaatatttcatctcttgcgacagattagttttgggccatcatgaaaaactttcctgaagattaagtcaaacttatctatgcatgccttctttggatacgtagatccacccttgacagctactctgtctactaattctgtcaagtaggactgagcttttctgaacacctctccttttgttaacaagaaggagaagaagaaaattaaacactcctggcatctgcctggctgtgatttagcccttggtaaagagtattacaaattgagatggtgccagactgctcctgtgattcatctcttctcctgtcaagaccagttgaagcgatgcaattggaaacctctctagtttgtgaagagacactttatgttggaaggaacagcataagcagaatagtacttaggccttcaaagcagagacaattgatttctctggattggtgaacaatcactgcaaattaaggtcaaacgtattatcaactaattcagtgtactaggcttcttcatcatttcccacgacttgttctcttttagaagatggtttagcaaattggagcaattattttttaaaaaaatcttgctgcagagttagtgataaaacacaagaaagtttaaggctggatatagcatgtccatctttatcaagacgcagatccatagagaggtgtgcttgctcttgggatactgggtgaaaatccaggcactgtgttgcgggaggctgatttctgaaagttggggcatcattgtttggcctgtgacgtttgtgtcaggtatgtcttgtcccacagaatactttttatagctgttaaaggacagattgtcttcaggacaattggtacccgtgccagagtatggtatattctgaaagaaaatccatttactctcatctgtaatttatccccttagttgaaacatgatcccagtgtaggacatttacttttcacattccatttaaatcagtgtagtttcttcctatcttaatgaattttacctcatttctttgtcttgcaaaaacccagggctgaatggtaaaatttcaaaacaaatctttcacaaggctggaactagacactctgttgggtcacatgcaagttatttgcagaagaggaacactttgcatgtgaataagagaaagcaaagcacttacaccaatactcagtgctcttggggccaggagtgaggggccttccatgtttgcaggacatctatttgggccttatattctgctacagccccaagtccttacctcatatctgcctggtgtcctatttttctgcttaaagagtcaaagactgaaattcttatcagtgtttcccattcattcctaagttactttggccttcacgtggagccaccatgctgtggcccacaaagtgtgctattcacttaaacttatttatcttaaactttttatgaattgtggttgcattctttgactttctttgctgatcacagtttacattaatcctgggacatttgactcttaagcgctacatgatagtactatctaatggtttccaatgttatacgaatgtctctctttcccatttcatccctttctctctgttggttttgacttgaagctctctggttgtttcatggcaatgattattagtgagagtattatctattaccaagtgtttcttgttcagttttgcatagtttcaatgtctttttaagcaaggattgccaaactacaagccacctgtttttggagatgccatttaattggaacactgccatacccattcatttacatatcatctatggctcctttctcactacaagggcattgtttggtagttaaaacacagaccttatgtaccttcacctcaaaacctagaatatttactatctgactctttacagaaaaagtttgctgatctctgctttgaagaagaggaagtcatcagatacagtgccaaagaattgctggctatgaaagagatattgcagaattctataattttcttaaagaatggaaaacactggaaaagagtcacctgtttacaggtgatttgcatttctataggtatcagaataatgtgtgtgcttgtaggttggggaaggaatggcaggcctctctctgtcagtatcttcaggccctgaagtcatacaatcaatggattgcttttcctcttcacttttccattttgccataattttcccaagggggaggttggaagtaggtgaatattttgagctaaaagagcatttggatacctcctgatagttactttagctcagatattcttagattctctctactgaaggccacaccttctctgtgcctcagcctggcatggtccagcgtgctacttaccttgggttcctgctgctcagcttaaagggaatctctttcatatgcctagagccttgtttactcagttcaggtctgtgccagttgacgccaagtcaaaaagcactttagacagaagcttgctttgaaagtgctagctagtagcaaataagtctggcttaattcccccttgagtctggagatctgattggaagagtaaaagggagaaagggatgatttatttgttgactggattgactactttatattagtaattatgaggcaattctacccacattatcgcatttaaatctccataaaaccctacaagggaggtaatatgctttggaaaactgagactcagagaaattaagtaaattgcaaagtccttatgctataagcattatagtctcataagcaaatgtcatgagtttcttctagctttttcctcatgctcacaaaatggttgaaggagatccatcatgtttctagttaaaaagaagatgcagagtaacaggcaaaaggtaaatggacaagccaatcaagtttattctctttcctagatgtcctacttgatgacttcagcttatatctcattagtctgcatcataggattatctctgcaagggaacctggaaaatgtagaaatttgtgttaagctgggcaccttgccacctccttaaaaatgtgctctataggtacagagcaggagataatcattattaataggcaacttaccgtctctgtttcaagaggtcgttctggtacctgagaagattgacaatctctggtctacactcttatagacctctcttgccttcatttaagatgaacttgatagaataaagattattgttcttctctcatctcctgggtatgagacagagaggtaacagatggaatgacttccttctggcttccatagcaaaccaaagcatgtgccagtgaagagtggcaactgctacaaatacttagccaaacgtggggaagagtgttgatgctctaagtctcctagctatgtctaggcagcaggtgtctctgtagatcacggcagcaatccctttggtaagggcatgaagagggcactcgggactactggattgcatcaacttggcagagaaaaatgtagcatgtactggagctctagctgggtagggaattgacaagttgaaccacaaattgactgctgttcagtcagcactagcttttatcttccagtcaccgttccatgtggctcttcgttgatcatccacaagctccaggcctgggtggtgcctgttgtgatataagaagggaacagtgatgtctccaaaatgtgaacactcatgtgtacagttttcatattggtaaggaaatgctagaaggggaacagctgtcagatgcctccctctgtctttgtacatacctggctacccatggcaaagttgttgttgtttccttccaggcatagagccgcaaatgtagaaaacaagcattccagcctgcaaaagaaaactgaatcccccttgtttggtcacttaaggaatcaagctcaggagggctggacgtgttttctgttgctctacaataggggttgaaacttagttcaattatggtgcttagctgaagcaccatgactgaacctttttttgcgaaggggaaaggagaagattttaaaatgaaatgccacaagtgtaacatagtacatatagaggtcacaaacttggaaagcctgtggtgtcttggaagatcacataaatgtgtgaaacacgccagttgcacacaggcaagcacatgtcccttctacagaaattattgccacagaggaatgctggttctaatctccatcctcccttcccctcccctctgctcctataaaaaccagaggtttggaattttgcgtgaataactcagtttgttagtgttgacaaccagggatgacagtagctcatttgaaccctttgtccaaatcaggaaaccgcagcccttccttcatggcagccctgtagctgtgccagttgagtgtgggctggatttcagcccttactctctcccttagctgagcctttgtgccagacacaagctgcccaactgtagacagtgggctcagaagttatcagtgttacatgagcaaaagaaaacatatctatggaccatactcagcccataggttattattttgcagcttctgcagctgtggtcaaaacaaagctctagggtcagatcacctgggtttcaatctgggttctgcccttcaggcaaatgactcagtatttctcggcctcagcctcctctatctgtaaaatgaagataaatacttgtacctacctaacagggttgttatgaggataaaatcaataatgtgggacaaacacttagctctacagagggtggcacatagcacttaatgttatataataccaaaatcatgtgaaaatctgattttttcagacttagagaattcacagcatatgaaatgaatgggagagtgcatgtcagacgtccatgattattttctgcttcttgaggaaatgcttatgcctcttttgtcactgtgaagacaagagaactcgaaatagtaagcattacttagcagctggcctactaaggccacaagaacaaatgaagtaaacactctacttgaaccactgattttgtttgcctgcataaaacacttgcacaggttgacagctaacatccataacaatgacatcctaaaaccattaagaaatgattaaattaagttcattatcatctgttgcaaaagacaaagatgtgtgaggtacgttttagaataacttacaatgaaaacaactaaaaagtgtggaagtttaaagtggcaagtattcagttacttgagttcatctgctgcactggtgtattctctggaagctgggccacagagttaatattccatctttaaagactgtaacagttgttttcatctaagatgcatcaggttctgcataaaaaatttggttgctggcactgagactgtgctaggaggagggtattaacttagtactgaccataatgaaatctgtggttgactgcaaggacttgggttgaaataagactaaatccagtagtattgctctgataggttcaatcatattcaagtgttcaataatgattataaagaaatgtcaacctgtcatacttactttaaaatatgtccagaaaagagaatctaagaaagtttatttagttccacctgcatgtaaattagcttttttttttatcatgacatcaatgtcattaggccctaaatgatattaagagtgtctatgagaccccaaagacaaagattgtccccaaaactcctattcttatttgtttaacatggacttggcccagctaccttcaatctaaagcttctttctctagagtaaggtatctcagtctttgcactgttgacattttgggccagataattctttgttcttggggctaccctgtgcactttaagatgtttagcagcgtctctggtctctacccaccagatgccagtgacctccttcccctcaactcatgacaaccaaaagtatctctagacattgctgtaatgccacctggggagagaatcttcctggtgagaaccactactctggactaagaaaagtagccagatttttaaacacagaagtgtttttcctcccgggggcaaaaagtgccctagagatggaagaattttgaaaataagctcttccacaaactatactgccaaaatggttagagaaagatcgtataatcaccatgcttgacaaatgatgtttttgctaagcctcacagcagctttgttcatgtattgtgttaattgcaattaaataaactagtctagaagtgtgggtcatcatccagcccattcgtatccctcctttacagtacacgtccagacttctttcagaattttgcttgcccattggtgctcacatataaaaactcagtgggtgagagttagggattcatagagcagagagggacctcagcttttcatatctacttttcttgttttaaaagacaaggcactgaggtccagaaagtggaatttgcagcacaaattgctatgataaacctcagtgattcagcccctcggatcttcaacaatataggcacagaacatataactattactgagtaaaatgtttaaaattatgttcttatggcaatgttcaagattttaggcataagtaagacaaagcagaggcaaaataaaaaatacttttcaaattgaaggcttaaaaaattaaggatatcctctatgcaccttctgctttaggatccagaaacttatgtttgtttgctctttataacacatgactgtgtaatatcagccaattgtgactggtaaatttccattaatttgcctaatcgtatttagaaattatgcctactaaataaattatggttggaacttgaaaggaaaaatggcttaaataagtgatttgttctttagtcagaaaaatattctcactttctctctcttgaaccctcatgaagcactgccagctccacctagtttataattaaggcaatgggaccaaagtcatcctgttagcacaggctggccatccctgtatccaaatttctttgactaattggagaaaaccactaattgtacattttaaactcaaaatgtctttaagtatatatatatttaaaatatattttatttttattaatgtattaattataattatattttaaattatatttataattatatttagatttattatttaattaaaattataattatatttattaaaataataattatttttattaattcatacatgtatataatttatgttttctccatgtggttagctgttgatctaaaggagaaagagcaaggcagaaaaattatcaggttcagtgtttaactgagagatgaggacatcactaaaagaaaggtacagcatgttctaccggtacatacaagttttgattacaaggtgtactcttgccgcctgttatggtatctcagctaactttagtttgtgattagtgggatctctgagacaactctccgtggtcaggtatagagctcattttgcccttggcatgttccaaatcacttcctatgctcaaccttctgagcaatacaagaaaaacttcctagtgtggcatgttatgaaggttattttatttaattttatttatttatttatttatttatttatttatttattttttgagacggagtctctcgctctgtcacccaggctagagtgcagtggtgcgatcttggctcactgcaagctcctcctgacaggttcacgccattctcctgcctcagcctcccgagtagctgggactacaggtgcccactaccacgccgagctaattttttgtatttttagtagagacggggtttcaccgtgttacctagcatgatctcaatctcctgacctcgtgatgtgcctgcctcagcctcccaaagtgctgggattacaggcgtgagctaccgtgcctggcggaaggttattgaaatacttcaggaaatgcctttgactttgttttggacttaagatgatgatttcattcagaaatgggtatagtgtcaaaatatggaatgtgctagtaaaataatcacgcaattcacttaaagaaacgaaaacaagacaaaacaaaataaaacttgtttgggatgggtgaaaggcatggggctgccgttcatcctgattttaaggtgagaagtggttgaaagaaatgtgatatttttacctaaaccatggtcgactatactttcactttttagcaatgatgtgaatgaggaatggctttgaagactgttggtggatttaacaaacatttatcaagagcctgctgtgagtgccaccattgtaggtggtagaaattccgcaataaacaaaacagagtcctttcttaaattttgtgaagggagaccacctgtaaacaaatatacgtcatgtcatgtagagataagtgccatggggaaaaacaaaatagggtaagaggctaggtggagcaggatcagaccaaggaatttatattttatataagattgtcagggaatgcctctctaattagatgccttttttgttttttttaatagaactgaaggaaataaaaggacgaggcttatggatatctgggggaagatgtcagaggctgttataaaagttacaacaggaaactgattaggactcttagccgacttatatatgcttagaatgaaagggattgggataaaagaaaagaggggagctttgggaaagcattaaactgtggccacagtactgattggataaaccataacactggagtgtctgcaagtttctaacatttttttaaagtatcagacccatagccctagtaataagcaacatggtcttttcttttagcatggttgtaatgaacatggtattcttttggagttatcctgcaaagcttacctactcgggaagtaatagtttatatgcattgcccaagttgaatattattaatttgggttgggaagtaatatgaccacattctgactgactataggccctagtccagttcacctgattttatgcccaatttttaatgagaagggagcttgctaggccaggcaggaagaaatggggacagtgtctaggaggaaatgcagaagagttgagtgtaggtaaatcccatctttcctggctttacatcgccttcacatccctcatatgatcttctaccccagtcttcagtataagcagtattttgttctgaagaaatgaagtcttggccgggcacggtggctcacacctgtaatcccagcactttgggaggccgaggcaggtagataatgaagtcaggagattgataccatcctggccaacatgatgaaaccccatctctactaaaaatacaaaaattagctgggagtggtggcttgcacctgtagtcccaactactcaggaggctgaggcaggagaatcgcttgaacccaggaggcggaggttgcagtgagccgagattgcgccactgcactccagtctgggaactgagcgagattctgtctcaaaataaaataaaataaaataaaatgaaataaaagtaaaggtatgaagtcttttccaagctaaggcaagaatgctgaaacctcaatcatagcacttttccaaaagagtcttaccttatattctgaatctcttccttatctcaagaggggcttctttctctttaaatgtgaaaagaagagaggcatcagctagccctattagcccagggctaagaattgctccagatttttgaatgcttaaaccttaaactaggtcacatgtaccagtggaaagtggctcccctgttttcaaggacagtcagattttaactacctgcctcttaggcttgccctgtctttggggttgttaaatatgcatgttgggagctgttgactgttttttttttttttttttttttttgtcttataatttacttttattttaaatctattatactttgaactgttgactgttaaagaaagcagtactggcttaggatcagcagagaatatgcttgaattctatttcttaaactgaggagaatttctgtttgagcccagtccaagtcattacttgagcaattttttgtacattttgcttgcttaagtgtttttttttctttttgcttttacaagtaatttttttaaggttatcatacactcagcaaacattttttgagcacgtacacaatgcccagccctgtgccatgcatgttcgaaaaaaaaaaaaggtaacattatatctgtgcttgtggaattaatacatttgttagaaggataagacttcaatcaataaagcaatccaagaaggaacaagtacaaagcctggtaggagacattagctcagtggaaagagtccactgaggtaggtagacttgggtttgagtcagagcttagactctaaacaagagtgtgcttttgtgagattttgcttatcctgtgtgggcctcagcttcctcttctgtaaaatgggataatagtacctattacattgtcacattgtattgctgtgatgacttgataatatttatatacaaagcaaccagtataatacatgctcatagtaagcacttattatattattattatttattggacaaataattagatctgggttataatcttgattctacaattatttagtttcggtaaatcacttaactttatcataccgttcatgcgtattacctatagagagaagggaacagaggttctacaatttatctcccaaattccatggtattttgaaacaaaatgtattaaataagtctttgatgtatgcttctccttcttgttagtgatattaacaataacaataaaaatcaatatttatttaggacttgctatggagccacgagtcgtggtgggttcttgacattatgttatttactccatgctgcatactcagtgagacagataaccttgtcttgtttcctagatcctaggccatattttatccagtttaatatttctgaaatcagaatgtattatatagttaataaatatatttaatgtggaaattttttcccaaaagccctttctaagtgagatggaccctcttttaattgaggatgtcttccaagggaaataaatattttttctatatttctgatggtacagttgaggcatagagaggataatttacgtcaccaagattaatgaagtaacaaaagcaaatttaggacttgaacttaggtttgttttatttaacaatactcaccctaccaacttcttgggagcaaaaaacttaaaagtttctgacatatattcattaattctttccattttttatagcaaaatatatttgatctatcactagaatgaatgatagattgactatttattaacttttaacaggaatatattttagtccctctagcctgactttataggctatgtactcagcacatgaaaatatatagtagcctcaatttaatgttgatgtttatttgatgttgacgtcactagtgacactggtcaagtgtatccttttagataagatcctattagaattatatattccctgtagaaattttaccttgaccatagtacatttaatagcagatttttctcagactttcaaaatcctgaaagtctgggtcattacaagaaaacaaggatgtggtcataaacagttgattattaagcaaattcattgaaaattaacagcagtattctttgacctcactcttcatagccaaactgctaatcttgggtaaatataagattatattactaatccattgacatttagcagaaattagttatcaaatgggccagttgttactgttggaaacttatgaaaatacattaaaattcttcccatttcctgtatgtttctttctctgacacagaatcttagagccttttattaggctgggagaacttcccaaataatctaatgactagttgaataattgtctatgatatcaaatcagctttgttgtcaaaatgattacagtttcagggtcacagttaatagaaaaatatttaagtgaaggttaccattctcgttgtaagtatcctttgattcaagaagtgaaacttttattgaaaaaactgtttgcagagctggttccctgatggacctttctgaagtttttaaaattaagaaatcctatctctacttttaacaagacaggaatgttagcatattcacccagactaaatgaatgagtgaatgatcacattacacatgcttaggatttgatttccttcctctggtgttccaatagactagcagcttcaggactgaagtgtgattgtaaaattacacatggtggaattcaaaatggtgtacatcagtcaggtcctggcaagacacacaatctaactcagaagtttcaagagactttaagggaaatgtacaaaagtatgggtagaattaaagtaactagcaaggaatgctgaggcacccaggccctagctgctatgagaagctgttatctcctctgggcctggagctgcagaagaaggaaactgtagtcctgagagagctggagtcatggaggaggggttctgtgacagaagctagagttctggagagacataggctaggccagagcataggggaagacatccctgacctctccgtcaaccttctaatcgccgttgttcaaacccagtaggaagttagccagcattgagcctgtagagtcagcccacagcagtcagcctcctgagtgcagagcagaggaagacctggagtggatatgccataggaggaggaccaaatagagagtaactagaccagatgggaaatgctattttagacctcatacactgccaaaaaagaatggcatattcaaggaacgcagggccttgacctcatttgatcttggatttgcatccattttgtgatactttgttccaaatacccttgtaagcatctgacagcagccaggagaattgctggtcagttcagcctgtcccagcttcatcgctgaggtaaatatgtgtttaaggagccgagagggctggtctgatagctcaccaaagggggactttcccaaaggtacatatgtgtttaaggagcagagaggctggtctgatagctcaccaaagggggactttcccagggaaaataaagagaaaattcattgagaatctgtccagaaaggacagtaagtaggcatgaaatgatagtagtaaggaagcatggaggaggcaggtgcataaaaatgatttctgatgtttttgaagctatgtgataacgttctgatccacactcttaccagcctctacaatcttctggaggcttcattggagagcaggattggtatactgtttattacaaatagtgtctgaagacctaagagatgattactgtcagcataagtggagatattacacattgcacctatctcccagcaggaagtttgtttgtttgtttgtttgtttgttttagacagagtctagttctgtcacccaggctggattgcagtggtgcgatctcggctcactgtaaactgcgcctcccgggttcatgccattctcctgcctcagcctcccaaataactgggactacaggcgcctgccaccacgcccggctaattttttatattttttagtagagacggggtttcactgtgttaaccaggatggttttgatctcctgaccttctgatctgcccggttctgcctcccaaattggtgggattacaggcgtgagccactgcgcccggcaggaagtttgtgtttaatgtccctgttgtttcaccaatgtaaaagaaaatggatatttttaaaagaaaagaaaaaagatatcacactgtgtgatgaaatttgtatctatgggtggtcatttgctacttggtaaataattaaagtctgtactggttaactttcctttagcagctgacaacaaataaacatccttacctcccaccttatacactttactccatggttcattgtcagtattattttgtacttctcttgcttcatcatactattgcctggcaaaattccaacccagatttaatcctgcttcccatctatacgctgcctacacctgagagctcaatgttactgttgaaaatgcacactgtggtggcttgtttcagtttaaatgcatgggccgtaacctcactgagccatttattagtaatgactggtaactcctccatatttctctaatccactcactttcgtagtctcctggacaactatgttatagctcctctctcctcaagccttcaacaattatttctcataccctatctctgtgcaaataaccttttttcctatttcactgcaaaaagcccagaagtaatcaaaagtgaatctacatgctcccaccaccacatctactcctcccagtctcagtgaccatatggtttgcctgccttctgttaacagagagcttctatctccacctgacactttatttccctcttgcatattcagggacattagctcagcaattttctttctttctcctttcttgtattatttattttctccctccaccagatcattgcaactgccatataaacacactgaaatatccctgatcgtatttttaaaaatgacacacacttgttaatcctgtgccttccttcagctactaccacatttttctgtccctatttttaacaaaacttactgggagagttttctatactctattgattatgatgggacggcagatggaaactgcttggctgctgtgacaatggctcaccctatcccagttgctacatctagtagcagatcctcaattcttatcttctttgacccatttgatcacccactcttctttacttggtctccacgacactacactttcctgatcttcctcacacctcacaggtccttcttgtcagctccctctgctctttttgctccttaccccaacttctgttagaatgacttaagaagcacaggcctcacacctatttttttttgtacacctctacctctattagcactcctgctcctattttaggaatccaggctttaatgctaacagttacaaattaagccacaagctttgtaagtatttgcctgtgctctagctgctagtgggtttttggaaaatcaatatttgataggcatttgaatacatttgctcttgtggctttaaacaatgtctgtaaaataaaaacttaagaatttacctcctctgaattctagacatttctattcaactacgtagatggcatttccacttgcatgccttaaaggccctcaaccttatctgtactgagttgatcaccccactaactgcctcatccgtcaattatccccattgcagttggtgacattccatcatttggttgcttcggttaaaaaatgttggagttcccccttgactcccttctttctctcatttcctaaagccaattctttggcaaatagtaaccatttctcatgttttcccctgctactgtcctggtccaagccaccatcctcattcacttggattattgcaaaggcctttacctattttatctgcttttatatttgctcatttttctccctccacctctatattttgctctcagcacattatatcatctcatgcgtctactcaaagccttctaatgccttcccttttcataatggcctgtaaggccctttgtgatatggttccctgaaatccttgacttcatttgggcagatgtttctgttacaacactatttatgtgttctgtaaaaccttttgttacacaagatgtactttgaaaaataacagggcttatggtaaaattacgattggaatagagcactcatatcttatacaacataaaaaactatagtactaaccaaagcaataatagataccttgggagataacaggcaggcaggcagctcagattgactgtaggcaattcgaggaatattaaaaatgcataaaaacagtagcatggacatgctgactggggagctgagatgaggcagatgaatggcgctctgagccagagggcctaccactaaggtggtcataggaagaagttcagcctgcattgagcagatagctttgcctggtgggagaggacatatttcttgggagacacctctgggtgcaggcactcatctttagttcccttaagagagctgaaatcactgcagtctgtgcagcagccaacttcagggatttttcctttcctgataaggttataattctgttcttgctattcttgctcctcttgcctaagaaaaatcttgtttccatgttataccaatattatcccactatttaccaatagcatatgagctgcttgctgtcacagaaacacatgccgtaatatgctgtaatagaacagactgtaatccttgggtcatctttgctatttcccatgtgtcaggtgagcacccaccttgtgacttttgctactggtcttttcctacctggaatactctccctccagaaatcttcatagatttcttcatctatgtcagatctttatttaaaaatatttttcatagtttgaacctctctacctagctgatttaaaagaacaccaccaccccaacaacattctctactttacatcatagtttaattttctccgtagtatttatcatctgatatattatattactcatgtattggctgaaccacatccataaatattaagatccgtgagggcaagacttgtgggtttttaaacttgttttcttcctttgtttttctctattatatcttcagtgtctggaacaaggtccagcacatacaaggcatttactaaatgttgagtgaatgaatgaattaagctcaaactccattacagtcctctgggttttttttttttttttttttttttttttttttggggggggggtgtatgtattttgtttttttgtttgttttctgtttttgtgagctgtcatctggcttttttttgttgtttttgttagataataatttgtcttcctttatttactgactttgtttttatgtcttccttaggatgcatcagagtttcatgctgttcacactatacttggggatattcagacatttaaagtcttaatatttcagcaatacattaaaacttctggcctggaaaaatactgtgatacaggttgaatttatctttttgcacccctctgtcatcataaccactccctgctccctcctgttctaggaatccaagctcttatgctaacaattaaaaattaagtccacagactgcaggtaaaccctatgcttgagctactggtgggttgctggaaaattaatatttgatggaaatttgaattaattgtctctttaccccccctaccaatccctgtgtatggtcaaaaaataggacattccaatactccagggtgatggccacagtgctgaggttataaaggagcaggaagatggtaatgaactccctctggtactggacaagggtggtgatgaaaacaatgcgagacgatggactcaggggttctcaaggcagagaatggtgaggggatccaggaatccacatattcaaagacacaaagaagtacagatttctgatgtgttcagggaatggcaactcattagacatgggggcgttggggcacagggtaggcagagaagagagcagtaggtgtatatgacatgaagattttggaatcgatccaactatacagctatcaaaggtttttggtgatacaaccagattcgtcttctcactccttacctctctcacctgatccctctctggcttttccaaactgtcaactataaggctgtgtgaccagagagcatgcccctggccacagtactcagatgagtgcctgacatatatatagagagaaaatcttcttgtttatgtgtctgaacaaactattaatattcatttctgcattttctttacagcaatacttacactgtcttcaaatcctttagggccctgcacctgactatcaggctgcccattggaaactaactttacagactgttcattgattactataatggcatgagtaaccattcagtaacttttttttttttttaactagaattgaaagctttgatccattctctttttctggtgtcatttcccttctgccaggtctgattcatggtgcaacttttggtggcatcacccccaactccagcaacatttttgtccaccctgaggttattactttgatgtcctgaacttatggctctgggggatattttttttaagggatcagagagataaggttgaattagagagattcttagaagtttatgattaaaacactgtcccctctgatctgagtcccagctctgccattgacaggttgtatatcattagcaagctccttcacatttctgaatctcacttgattgagcaaaatttagatctcaaagactactggagatgtgatgctttcacacaaagaaatctacctctttggtgaaatttcaattgtttaggagcaattatttggaagaaaagtgccctctcaccttcttaaatcatctcctagggctataataggaaatatgcagcttttgctgagaacccaaatgacattgtggattatccagctctagtcttctctctcccatatagaggtcggttatctttcccacttcagcagcccaactcagggccatggagaggaaatagatgagatgaagcttaaatatgtcacattagttatttcttagcagctctgataaaagctttagcaggggccgggcgcagtagtgcacgcctgtaattccagcactttgggaggccgaggcagcggatcacctaaggagttcgagaccgcctgaccaacatggagaaaccttgtctctactaaaaatacaaaattaaccaggtgtggtggcacatgcctgtaatcccagctactcaggatgccgaggcaggagaatcacttgaactcaggaggtggaggctgcggtgagccaagatcatgccattgcactccagtctgggcaacgagagcaaaactctgtctcaaaaaaaaaaaaaaaagaaaagaaaaaaaaggttcagcagggtgaggttaaaacttgattaaagaggtctgaggattatctgtgatgttaactcatgtatgttgccttcctctcttcccttctttgttctagggattagttgactttgttctagggattagttgttctaggaatttctagggattagttgactgcaaacattaatgggttaaatataaaaaatcttttctatcctgaaggtccttgaaaaaaatgattttattacttaccggaaaagaaaaataaaacaaagtttacttcacccagaatttatttattttttcttctagtaaaaatgagcaacttctttaaccagaactgaccttgaagacaaatggctaaaataaaacatttgctgaattcactgggcgcatcttacaagtaatttttggattctgcattgactgcctacaagtgccttctgggtacaagtccacagacaagatttgttctgcaaatcttccatgaccaaggtcacctctttggattggcagacccagggagtccatgttgggaagataaattcacacttcatcccttgttgagatctccagccttgctcctctgataactaaccaggtctttcttctgtcttattataatttatgacttttgaaaagtgaattatatctggggttactcaaactctcagctatctataaccatatacagaaatggttctagattctttaaaaaaaagaagctattcagtgatattgggatactctataaccaatataaatggataattcagcacaccaggtgctggggttgagaaatagaggtgaacaattgaggcagggccaaataaagattggaggcaaagacagtgactagatggggatctctgataaggtaatgcacaggcctgtccttggaattctgccacagtggggacattagtgggagcctgtagtcattgcagggtgagaggaggatagaaagaaaagattgtgtgaaggtcagtggaaggtcccccatttcactggtaagagaactatgtatgcaagttttcctgtgtttagtctcacacatgtttggacctttaagaactgatcacgtaatgcatttccctgacagtttttggcatctcagacgaggaagagtgatgggcgacaggtgatggtgacaactattaataagatctgaaagcaaacagtctcatgaaaggtggccaggagagggcagtcaccttttttcaagagtacagactgaatttgcaaagagtacttaggctacaaggctataaagcatgatgcaggcttaagtaaaatgcagtgtcttgagcatagtagaatcttagtgtatgtttgctaaacataccttagctgctgcttttccccagagctcatcagagttccatagaaacctggtcccttccagaaaaccaaagaatgactctaaagaaaagtgattgcaaatccagaaagcagctttgccttattggttggtaacagcagggttttctttcccttgtagtttattttggcttaggctagtgtctctttcatgaagacagctactatttacaattgttgttaacatgtttttccttttcatctcccaatatactctcttcctgtcattaaactcagtcaatttactaatggaatctgctttataagctgctgcattttctttttccacagatgggattaaagccattatgttctatgtcatccaaatagtgttagcttctaggcaccaaggtgttgttccagaggaaaggagaataatggtggacacaggcaggctgagggctaacctaatgatttcatgcatttagtggtaatccttaattaagatcccagttttattttgttggatttagtctgtaacctgctggaaatcattcttgaattaacactgggtggttataaaagcagtaagccaaggagtttgcacttttttcagctgtagctgtttatttagctggagaaaatttagtgggtggtccaaccttcataaccaggaagaatagaatagaggtgtaaaggccttggtggaaggagggcagtagcaacctttccatttcttcagttttatcacagcttataaaattagttcattaggtatgttgatcttgtaggagctagtattttaacatttgccccatgaagttgtttagtttaaatctaagaataaacccactgaaaactattcctaattcacaaaatgaataagaaataatagatgttaatagaaacaaagacttcatttggtttgtttttagagggggcacagaggatgtagtaatataataagttagatttttgttgttttctttgtctttgttctttgtagtcattattatctctaattggtatttgttcctgagttttctcagcgtgcttccacatgggagagataaaagtctcaaagctggtgtacaaaaacccttaataaattgcccattaattagccaccttgatttccacctttaaagcagtttagtgaagtgagagtttgttagatttttctcaagcatagcagaaattaagattaacttcttaggtgtcattgctacttgcctacttaaaccagttcatctttatcataaatatttaagccaaaaatcacattagaggcaatatggcacagtgactgtggactccggagtcaggtgagctggttgaaatcctggcttggctacttcccagctatgtgaccctgggcttcagggttcccttttgcaacatgacatgattgctgagcttctccttagggttgtgtatgactccaataagataatacatgaaaagagctgaaagcagtatctgaccctggagagaaagtagggaagagacaatgaaggaaggaggaaagaggacaaggaagtgggagatagaaagaaaattcaagaaggaaagtggaagaatctcaaatagaaaattaattttcagtttttcctgagaagagatatatagacatgttcatgtggctttggagagccttggagcccatcagcaagaggtttggaaattacattgaaacagaagtgtagacctatgtgacttatgtcctggccagttgcctcatgtcctctgtggtcagattgatctctattggcactgtcaaaggattttttatggacagctggttggggtaaactttgaaacctgattgtttgcacttgagtgccagaatgtgtaattatttactggtgttcactaaggatgtcactgtagctttttagggggagaaagaacttaagtttaaaatttggaggcatctttttcagtctgcctgccctggtgtttgttataacacttagtttggcatgtaacagctgaacctactggttaaatcattaagcatttattattttaaaactcatcttctcaaagcgaaaaataactatcatgttgaagttctttcctctaagaatgacatttactgtgagttttataccaatggactaattgaagggttgagaaaataaattttggaaagacaacaataacttcagaattttccttggatggaggttttctttttaaaacctgaactgagctttatcaaaacagtaactgaactttgaaatgaaacaagagtgctgagttgaaagctccaggaaggcagggatgtgtctgcgttgtttatgactataacctctgggcctaaatcagtacctagcccatagtaagcactcagtaaatgctgaatgaatgagtacggttttaaaattagcatgactgttccttggaaaaaaaataagtcaaaagggaatagcatgcatatgtaactaaatgtttgaaatctcatcacttttttaaggtcaggacctgtttttttctgctccaattaaagaagaaaattgtaatgtaaaagaagcataaagtgaaatatttggtatttatttgttttgacatctgcaataaatttaaaataaatttgtaaatcttattgtattgaaattgtatgagtttcttaagtggtattattcattcagacttaaagtgaagttaggttgctgtcattcatagtggacatttttttttcattattaaaacaacaggtcgtctgggtgttgtcttgtattacagaagcttgcgtgttttctcttgatgctgtgccgtttctattgccattgaggggtctaaggaccaaatgaggtcttattccctttctgatatattcttttggccagtttagaatatgccaggtccattcacatgactaactggctcagttctgtcagttccctcgtcttctcatattagattgttatccatgagcttgaagtttagacataaaaaagaatggttataattctcttccttcactccccctcttccctttttttccttaaagttggccttttgaattcattattctaataattaatattatatattattatataatatagtatatattcataataatgattaatgatagtattaataattgtgtgtgtgtgggcggatactcatacagaggaaaacaatgagattgattggtggaaattacattaatttcataacctcttattaaaagagtttgtgtgtgtgttgttgcttgtttgttccctttgcaactcaaataacatggtcttcttgaggtgcagggaaaacatatgcttaggaaacagagcctccttttccccttttggtatgaagacatatgcaaaaagaatgaaggaactcattgtctctagccagggcgctgtaaaaatagtactggtagagaaaaagctctaagagaagtaaaagtttatagtgctttctcctggcagagttaacctcatcttcatcagcttttcccctgcctcagagaggcagttttggaatgaccaaagcagagtgcgcaagctctctgttcagagttagctagcgtttggatcactgtctctctctgccacagtatgagtggaatattgcatgaccatttctgacttctacattgagcacactcggcctagatgaataaatcctccttgaagaaggtggggcattttggcattcacaagaaaccaagttgatatctgatcctcccactggagaaatgtggcaaagtgagaaagactcactctttgggactctgaaaatataaacacaaataaaaattcaagctgaagaagtcacttgaagtaaaaaaaaaaaaaaaaaaaaaaaagtgttaaactctgttagtcatgtgactttttcttggcattcaaggagccaggaggctcttgtggtctaatctggaaagagtcgctaatcgctgtgtcaccctggcaaattggttgatctccttgtgctggagtgtttagtccagctgctggatgggatgaaagcaagacctcactgaaaccagatgctgtctctctgaaaagatttcagcaataaataatatcatatatactttgttcctggcggcaaatactgaactgttataaccccctgttttcacttgcttctaaatttctgaaaatatctcctttgggcttgaatttttccatgcttttcttcagcccaaaactttttggaaagtttgaccaaaatttcacttagctgtttttcctgaattatgggagaataaaggcattgcattgtttttcagctcataaattctaatttttcccattatacctcagaaaaatagctgagctgctacttttaaagtgtttagaactagtaaaagaatcttggtatggtaaagaatactggcagaagacaaatttaagtctctcagtatttctttctaactctaaacatgaccccacacaaccaggacacacataaaaagctctggtatagttttatagatgaccaaagagaagattctgcaaattctctcagtaactcatcccaagttaccaagaggcaactttagctaccatcagttgcacctttcttaaccacttgctctatgtctgtggatctgatttctaaaaagatgtcatggttatatgctggcattaattgaccctttgtctatattttaattgaagttgaccatttcttttaggtagccttcatgtgtgatgacctcagtcacatctgctgacctagtagactgaaaactcctttacagcaaggcctacgtctgtctccctcaccattgactctgcagtgctcagcagggtatcacgcatgtagtaaaaactgattattgaatcaattaaatgaccataagtacaattgtttttactgcagttttttcattgatttgtccactaagatatgcatgcatgtgttgagtgagtatcactgagtctctactttatgccaggtattggtatgaatgttgtgaatatttctttgctttgatgggtgacacagaagtttggggggattaattaattatacacaacaaaataattatattatttgaatacaattactatgcctatagttggaatattagtccaatctagccaaaaccaatcccagggaatttatcacttactgagcatccatgatgtgcctggccctgtgttaggtactgataagagatcaattagaccagtttatgcagaaagacacacataggttaacagtggcaagacaaatcctaaagtacctattatacaagggaaactataataaagagccaggtgagttgaaagcaggagaggtatcattgtaccacaagatacctcgtgatcttgtgtaaatcccctgaacaatcagaaaaagcgttatggcatagctttatggtcatagatctcatggggacaggcagttcattgcaattccttttatagccgcatccttcactctttaaccctgcactgtatgccattcattctctctgtgctttcagccttggtcaaatgtctcaggactggaaaataaactggaatgacactcaggcacttgatatcaagattactagggtcatgattgtatgtataagaccccaagacctcttgatggttttacaagcatgggtactttttttgtacctatgttttcttcttttgccccaagttcaagagtatgttacagcagcagtataagcatacacaatcaaaggtgattgaagtgaggaagattggctcaatgagctccagccacttcgactctccttctagtccctaacccaccaaactaattgtccccttgcctggaatgtttcaccctcagattttggcatagcaggcttctttttgtcattcagatctcagctcaactgcaagactttctctgacctaaagttacatatgagtcaccccttctggtctccgttgctgtctatcacatcacctactgtgcttcctttatagcatttatctccacctaattgtgtccttctcagtgtttttctttaaactttttattgtcagttttctttcactagatgtcagttccatgaagtaggaaacctttaccaccggtcttgagtgctctggaaagtgtatgtgtgcaataggtgctcaataatgtttacgaaatgatcagctggatgtacatatggcaagtggcaagaagccaagggaataggtcaaaagtcctattgtgctccttgcctgaacaaaacctcttgcaagaatcataggctgttcttgagggtgcctttgccttggattcagcccaaaattctcctatttgttttgtgtgagagttttcctcccatacacagcaatgggcactaagaatgcatatatccagacttttcaagttacaggatggcatctcagatacagtcttcctttggtctatatactatgaagtcataattgcttaagccagtgtctttttcaggatttactccgtacttcttattcgaggcctttcaggtggccactgccctggctttcagatataatttagaatttagcttcggatttgtaaagctattcatgttgcagatcttctctgaaacatttctgtcacgttttggaaagctttacattttcttttgctaatgattttcatctgccaaagagctcatctacttaaaaagcagatcactgaagccacacttggcacatattactttggcttattttctttcgatttttttttgcttttctgggataacttatttatgaagaaagagagaacgctgactttttaatttagaagagaggatattacttgcgttgagagttctagttatataaaatgtatttatctaagttgttaactatatcaaaaatggagcagtcaatgtttggaaatagttcggggtgaaaagattttagcgtgttcacatattctcttagctgtttttaaataattttgcaaagcttatttgcatttcccaaattaacaattttgaccaacaggaaaagctaaagtgttggtttttctcagctcaactttttgggtgtaattaatttataagcaggattttatgaagggagaacagataggacctttctacaaagtccctgagccaaataaacaccccattgttccatagttttgtattgcacataggaaaacatccatccctatcatttttctattaaagggacacagattaccagatttgtaattttaaaaaaggccatttgttgattgagccactttgcgtataaagggtggtatatgttgcctgccaaatttctgtcaacacaagaagaaaaatcatatatcaaaaaaaattttttctcatatcatgtaagaaatttatgcattttagtatgtaccagaagaaatggcataggcattttctgtttttagcagtctattgaaatttcttgattaaagacattttctatttgaaggttaaaatgaccatataaatacagattaattcagttttaatagatgcatcttcctgtcatttaccactttcctccctcaacatcagctgcagtgatcaacatatatttggcagtgaaaccgatatattctgtttatcttcaaatcataagctttttgtttaaatacaacggaatatcttatacctctgattttaatatgacaaatcaaaaagtccacaccaaacccccaactcatcccaaaaaagagattgctatctactcattactgttcactgcttccaagatttgtttcccttggggttactgtttgagaaacttttcttacttccaagattatttttctggttttaagaaagaatctgaactccaagatttttttgtttgtttgttttcagaaagagtctgaaaatctagagattgcttaccttgtggtgaggtggttgtctatgcctctgttcaacaaagtcctcatatactgaatggaaaaaaaaacatcagggcctataattttctaagcattgtgcaagataatagaggagacaaaaatgatgtcttgcttcagaagtcttagatctatttctctttgggggttgaggaatgagaaagattttcagatgaaacaggaagcccaatgaggattatgtggcaatagttcctaaaatgagcaaagagataaatttacttttgtatatgattacaaccaaatcacacactggtgagtttcaaaacagtagttttcatttagaaagcaaattaagtggaataattcaactgagtttcactgcaatgggattcattctagatggttcaactgtggaattagaaacaatatctaaggatgttgctgatagtagtcagctgatgaataccagtgagccatatacaggtatacataattttattgtgctttgctttattgtgttttgtagataattgtgtttttacaaattgaaggtttgttgcaaccctgtgacgagcaagtcttctggctccatttttccaatgacttgtgctcatattgggtctctgtgttacatattggtaatccttgcaatgtttcaaacttttttattattattatatctgttatggtgctctgtgatgagtgacgtttgatgctattattatattgttttagcacactatgaattgcacccatataaggtggggaacttaataactaaatgttgtgtgtgttcttactgctccactaactggctcttcccttatctctctccttctcttctggcttccctatcccttatctctctccttctcttctggcttccttattccctgcaacacaacaatattgaaattaggcccgttattaatgctacagtgacctctacatgtctgatatggtatagttgtgtccgcaaccaaatctcaacttgaattgtatatcccagaatttccatgtgttatgggaagcacccaggggaaggtaattgaatcatgggggccgatctttcccatgctattctcgtgagagtgagtaagtctcactagatctgatgggtttatctcatgagatctgatgggtttatcaggggtttccacttttgcttcttcctcatttttctcttgccaccaccatgtaaaaagggccttttgtccccagccattattctgaggcctcccaagccatgtggaactataagtccaattaaagctctttttattcacagtttcgggtacgtctttatcagcagcatgaaaacaaactaatacggtaaattggtaccagtagagtggagtattgctgaaaagatacccaaaaatgtggaagtgactttggtagtgggtaactggcagaggttggaacagtttggagggctcagaagaagacaggaaaatgtgggaaggtgtggagcttcctagggacttattgaataactttgaccaaacagcctgataacaatatggacaattaagtccagactgaggtggtttcagatggaggtgaggaacttgttgggaactggagaaaaggtgactcttgttatgttttagcaaagaaaccggcagcattttgcccttgccctagagattcgtggaactttgaacttgagagatgatttagggtatctggaggaagaaatttctaaacaacaaagcattcaagaggtgaatgtttgggtgccattaaaagcatttcattgtgaaagggaaacagagcataaaagttcagaaaatttgcagcatggcgatgccatagaaaaggaaaacccgttttttgaggagaaattcaagccggctgcagaaatttgcatgagtagcaaggagcctaatgttgattcccaagaccatggggaaaatgtctccaagccatgtcagagaccttcatggcagccctcccatcacagacccagaggcccagaaggaaaaagtggttttctgggccgggcccagggtccctgtgctgtgtgcagcctaaggacttggtgccttatgtcccagctgctccagctgtggcggaaaagggccaacatagagcttgggctgtggcttcagaggatggaagccccaagccttggcgcttccatatggtattgagcctgcaggtgcacaaaagtcaaaaactgaggtttgggaacctccgcctagatttcagaagatgtatggaaatgcctggatgcccaggcaaaagtttgctgcagggtcggggccctcatgaagaacttgtgctagggcagtgcagaaaggaaatgtggggttagagcccccacacagagtccctgctggggcactgcctggtggagctgtgagaagagggccgctgtcctccagaccccagaatggtagatccaccaacagcttgcactgtgctgcttgaaaagctgcagtcactcaatgccagcccatgaaagcagccaggagggaggctatactcggcaaagccacagggtggacctgcccaagaccatgggaactcacctcttccatcagtttgacctggatgtgagacatggagtcagaggagatcatttttgagctttaaaatttgcctgccctgctagatttcagacttgcatgggccctgtaacccctttgttttggccaatttcttccatttggaacagctgtatttacccaatacctgtactcctgttgtatctaggaagtaactagcttgcttcttattttacaggcttataggcagaagatatttcccttgtctaaagtgagactttggattgtggacttttgggttaatgctgacatgaattaagactctgggggactgctgagaaggcattattgcttttaaaatgtgaagacatgagatttagaggggccagggccagaatgatatgctttgactctgtccctacccaaatctcaactcaaattgtatctcccagaattcccacatgttgtgggagggacccagggggaggtaattgaatcatgggggccagtctttcctgtgctattctcatgatagtgaataagtctcatgagatctgatgagtttatcaggggtgtccgcttttgcttcttccttatttttctcttgccgccaccatgtaagaggacccttttgcctcctgctgtgattcggaggccttcctaatcatgtgggactgtaagtccaattaaacctctttttatttccagttttggatatgtctttatcagcagcatgaaaacaaactaatacagtgtccaagtgaaagggagaatcacaagtctctcagtttaaatcaattaagcttagtgaggaaggcatgttgaaggccaatataggccaaaagccaggcctcttgcaccacagagttttccaagttgtgagtgtaaaggaaaagttcttgaaggaaaataaaagtctactccagtgaatacacaaatgattaaaaaaaaaaaaaaaaaaagaaaagaaaagaaaaggaaagaaaagtgaaacagccttagtgctgatatggagaaagtttgagtggtctggatagaaaatcaaaccagccacaacatttccttaagccaaagcctaatccagagcaaggccctaactctcttcagttttatgtaagctgagagagaaagctacagtagaaatgttggaagctagcagaggttggaagtttaagaagccatctatataataacataaaagtgcaagatgaacctgcaggtgctaatttagaaactgcagaaagttatccagaagatatagctaagatcagtgatgaaggttactaaacaacagattttcagtacagacaaaatagcctattggaagaactaagactttcatagttaaaaaggaaaagtcagtgcttggcttcaagacttcaaaacttcaaagggaaggctgatcctttttttatgggttaatgaagttggtgactttaagttgaagccagttctccccagccttgctagagagacctaaagtcaaattcaggaaatacagagaacctctgcaagattctacacaagaagatcatacccaagacacgtaattatcagattttccaagatgaaaatgaaagaaagaatgttaaaggcagctagagagcaagggcagatcacctacaaaaggaaccccatctggctaacagcagacctctcagctaaaaccctacaagctagaagagatggggggtctatattcaacattcttaaagaaacaaatcttcaaccaagaatttcacatccagccgaactaagtttcctatgtgaaggagaaaaaagattcaaagcaaatattgcgggattttgttactaccagacctcccttataagagatcttgaaaggagcactaaatatagaaaggaaagacagctaccatctaatactaaaacacgcttaaatacacagaccagtgacactataaagcaaccacaaaagcaagctattataataaccagctaacaacacaatgacactaccaggttcacacatatcaacactaaccctgaatgtaaatgggctaaatgcctcacctaaaggcacagagtggcaagctggataaaaaagcaagacctaatggtatcctgtcttcaagagacctatctcacatagccttaaaacaaaggggtggaggaaaatcaaccacgcacatgggaaacaggaaaaagcaggggttgcaatcctaatttcagacaaacagactttaaaccaacaaagatcaaaaaagacaaagaagggcattacataatggtaaagggttcaattcaacaagaagacctaactaccctaaatatatatgtacccaacacaagagcaccgtattcataaggcgaggtcttagatacctacaaagagacatagactcacacacaataatagtgggagacttgaacactccactgacagtattagacagatcatcgaggcaggaaattaacaaagatatttaggaactgaactcaacattggactaaatggatctgatagacctttatagaactctctacctaaaaataacagaacatacattcttctcatcacccacatggcacctactctaagactgatcatataattggaaacaaaacaatcctcagcaaatgcaaaataactgaaatcatacaatttcaaaaatcatagggcccttaagaattatgctaaatctactctgtctatagtctataaatggaacacaatacatgtgtaatagtacacctgtttacattatggcttgctgaatattttaaggccacagttgagacctcctgcacagaaaaagatttttttttttctaaatattagtcctcattgagaatgtacccagtgaccaaggggctctgatggagatgtacaaggaggttaatgttgttttcatgcctgttaacacaatgtccattctgcagcctatggatcaaggagtaattttggtctttaagtcttattacttaagaaatacatttggtaaggctatagctgccatagatagtgattcttctgatggatctaagaaaaatacattaaaaaacttatggaaaggatttaccatccaagataccatttaaaacttttatgattcgtaggaggaggtcaaaatatcaaccttaacagcagtttagaagaagttgattccaattctcatagattactttgaattgattcgagacttcagtggagaaagcagctgcaagtgtagcggaaatagcaagaaaacttgagttagaagtggaacctgaagatgtaactgaattgctacaatctcatgataaaacttgaacagatgaggaattacttcttatggatgagcaaaaaaatagtttcttgagatggaatctactcttggtgaagatgccatgagcactgttgaaatggcgaaagatttagaatatgacataaacttagttgataaagcagcagctagatttgagaagattgattccaattttaaaagaagttctgtgggtaaaatgctgtcaagaagtatcacatactacgcagaaatcttttatgagaggaagaatcaatcaatgtgacaaactttactgttgccttattttaagaaattgccacagccaccccagacttcagcagccacccccatgatcactcagtaggtgtcaacattgagacaagactctccaccagcaaaaagattatgactcactaagggctcagatgatcattagcatttttagcaataaagtatttttaaattaaagtatatatattgtgctttttttagacataaagctcttgcacacttactagactacagcaaattataaacataacttttttttaattttttattttttttgagacagagtcttgctgtgtcacccaggctgtagtgcagtggcgcgatcttgtctcactgcaagctccgcctcccaggttcatgccattctcctgcctcagcctccctggtagctgggactacaggcgcccaccacaacgcctggctaattttttgtatttttagtagaacccgggtttcaccatgttagccaggatggtctcgatctcctgacttcatgattcgcctgccttggcctcgcaaagtgctgggattacaggtgtgagccactgtgcctggccaaacataacttttatatacagtaggaagccaaaaaattgtgtggcttgctttattgggatatttgcttccttacggtggtctggaactgaactgcagtatcttcaaggtatgtctgtattcaagtttatattttcacatacattcttctttacttgttaaaatcatggtcacctcgttattatatgactcattagaatttgcacggttgctttgaccgtataccattgttctacgactacacagatgtctgagtcccaaaggtgaatctgtctggccaattctgaatttaacagcctatataaaaagtagatgttacacaccttgtataacagaagccccctatcatgaacacagcttaactcttgggtgggtcacttagtctgcttggttgagattttagtgcttttcacatctatagaaatgtcctatttgtctaaggcaattttttgaagtaaatttattcttgtcatcctttccgacctgaatatagaggatatataatttttaacattccattattacctaggggatgctcttcagtcattcttccctgaattgattgcactagccctatctttttcacctgaaataagttaaatgtagaattagcactaaagagaaatacgatgaactccttccagaatgggaataggaaatgaaagagagtaaatcagaagtgaatcacttttttttttttttttttttttttttttttttttttttttgctttgcaaatctatattttttccagctttatttaggtatgactggcaaataagagttgtatgtattcaaggtgtatgacatgatgatttgatatatgtgtacattttacagtgatcaccacaatcaaattaatacatccttcaccacacagttaccatttgtgtgtgtgtgtgtgtgtgtgtgtgtgtatgtgtgcaagaggagataagggagtttaatcatttttgaacactagctacaacacaattcaattaaaattctgagaaagaaggaaaattgtcatgcagctgtttaattttagaagcattaactgacaaaatccaagtcttatgaggaatactcagtccaattttcatgaatgaatgggagcccttgcctctgaaattgttgtcatggaagaaatgctaacactgtcttacacaattattcaacttaccaattgaattaaagtaacaagatgagccatggttgtaactgagaatggcaactaaggtcttcttatttaatctgctacctagtttgcctttttgctttagagtggggactatgtttgaattcaaagaataaaagacctttatcctttcaggggagatacaagtaacaagtttaacttttttttttttttttcttaacactgacgcaactcatttggggctgtggaaattgctgctagcattgaaccccttattaacattcaaggtgtgccagttttgcacaagctgtgtcatattcagagacagattgttggcacaaactaaggcacttattctcttgttttttcacctctttcaataagaacagataaatataataaatatactatttctagataagcagttgaaactgctctgctcatctctttggaatacatttgtgcgggatattactgtatgacatgcagaatatataaatatacaaaggaaatgcgcctgcatacattgagatataaatggatgcctattttagaataatatattatttcttaaaagtaaaataagttttggctggtcgcagtggctcatgcctgtaatcccagcactttagaggccgaggtgggtggatcacctgaggtcaagagttcgagaccagcctggccaatatggtgaaaccctatctctactaaaaatacaagaattatccaggcatggtaatgtgcacctgtgattccagctactcagaggatgaggcagggaattgcttgaacccaggtggtggaggttgcagttagctgagatagcaccgttgcactccagcctgggcaacaaagtgagagtccatctcaaaaaaaaaaaaaaaagtaaaataagttttttaagtcactgattctgtttctaaggaattctcagctggggcttctgagttaattctcgatggttagcacttatgagtagcagaaaagaaaactactgtgaattttctctacaatgatttaagacagtgaatggggctttctggcatgtttgcagttaggaactcagatgaccatagattttttttttttagactgggtcttggtcttactatgtcacccaaactggagtgcagtggtgtgatcatagctccctgcagcctcgacctgggctcaagtgatccacagatttttgaagttcaccctggattgttgtgttctatacagaggttctaccttttgctgccttttatggttgctgtattattattttgatgtttcttaaccagctgaatcacattgtagtatatgaaatatgttttggcccttgttttaatggtcatttgctagcagatttcacaatggcccacttaagtaaaatgtaccaacccattcattgctatttgttgcaattcatggtgactaaacatgactccatggtgcagctcaccaaagtcttggtttatgtgtgacttccaggggagagagattgagaaccatctgttaatcattgtgtccctaaactagagtttttcactagagtagttgggcagttgaattagtatgtttctcgtaggctagtgagaaaaacagatttttgggggacattaatcagactctgctggcccagacctctgggaagccttgtgacaagatccagcctgtaaaatatcacatatgatttgcttttcttcttgaaagggacacattgtggcttttctctggaatctgtgaagaaaatgcttctgagcctagaaactggagttgagaaagctcttcctgatcatataacaataagtcttgtgagggtcaccccttgagccatgagggcaggtagaaggaacatggggttgagagtcatggattcagtgattggaactcacttgactaaccagtgtagctctgccacccctcttaggattgttacagtgatatgtgcctacatatagaaagtcatcagaacttctgtttatttttctgtgtaatatttatggacttgttacatttaactctaggcaaaggtatagatttggaggtctttgatgtatatatattatatataatgtattttagcatacaaaggaggctataatacatactcatgtacctgtcacatgaatgaattcatcaaatgtaaacttttttcccaaatctgcttcttagctgttatttataaagaaacaaattatacagaaaaatttgaaggcccccattttaccttccccagtctcattcttttctctgccaccccagagaaaacaactgtcttgcataggtatttatataattctgttttatactttgccacttttactacatatatgaagcatgcttgttacatacatgaacataaaatatacatgttttactgtaagtgtgtaatgtattctagaatttgctactttactaccaaatattttgtttccagaatttaccttgttattatataaccctagttcattttttaaaaaattgccatatattactccatgttatgaaaataccacaatttatttattcccatactaaccagaatttgaattgatacaatttttaattaaaattaatgatgctgaaagaaatgttcttatacatttccctcagggcatacgtgatagagttcttctcacatatatatcagtgtacttgctgtgtcttaggatttgtacaattgcatgtctgttagatacgccaaattgttctgcaaagtactcatacctgtttccactcctaccagcaatgaatgagaactttgtttcccaggtcgttgccaacacttgattattatcagatttaattatttgccagttgatggatatgaattgctctatcattgttttaatattcattactttgattatatataacattgggcatacattttatagggccatttaaatttcctcttatctgaattacttatttctcctcttcattgattcttctattatcttttcttctctttattaatttatagaaatgtgtatatgtgtgatcctaatatatgtcataatacctatgttcatatttcgtatatatgtataaagaaatatttgtctgttatatataggttgaaaagtttgctccctatctgctgattgcattttaattttgttcatgacatcttttaacatacatgatctttaattttgatatagttaatttttttttactctacattttgagaattgcttaagaaatgactttattttgtatagtcatatgctctaaatttttaaatctacttacgatagttttatgttaaatatgtcaacctttgtttcaccgggaatttttttatatgtatggtataaagcataaatcaatttttttactattaagaatgcttttattatattatatcttattttattctatttttatttttccataagttattgaggtacaggtggtatttcgttacttgagtagattctttagcggtgatttgtgagattctggtgtacccatcacccgagcagcatacgctgcaccatatttgttgtcttttatccctcatccccctccctccctttccccaagaccccaaattccattgtatcattcttatgcctttgcatcctcatagcttagcccccacttatcagtgggaacataccatgtttggttttccattcctgagttacttcacttagaataatagtctccaatctcatccaagtcatgccattaattcattcctttctatggttgagtagtattccatcatatatatatgatagaatatatatatgtgtgtgtatatgtatgtgtgtgtgtatatacatgtgtgtttgtgtgtgtgtgtgccaacagacgtcagggtggcaggtactggggggtccctgattcctgctgcttacctttcttgctgccaatggtccttaaaatccaaacatgatgccctctctgtgtgagcaaatttggggaaccaaaggaaatcaagcttgtaaacaagcagtaaattttcccaggcacaatttgtttttgctccccaaaagtacacagatagaaaattttgtgagatcagaccagtttttagtatttatccagcataatcatttggcctaagcaaacatgtaaaggggcttctttttgaggctcaatgaataggccgttaaagtaaacgattccatctctccagaccccgacacgctcaaattcacttgaagagaaacactttttaatgctgaattnnnnnnnnnnnnnnnnnnnnttgagccgaggagtttgaggttgcagcaagatatgattttaccgctgcgccccagcctaaacttcagagcaagactctgtctctaaattaaaaacaaaaccaaaaaattctactacagcatacgttttatggataaattttacaccaccattgaaacaattataatacaatcagtgcattttggaaaaaaagaaaaagaaaaaaggaaaggggaatgattatattatactagtggtagggtattccctaacaccatatatatacacaccagtttctttatccactcgttgattgatgagtgtttgggttggttccatgatttttcaattgcgaattgtgctgctataaacatgtgtgcaagtatctttttcatataatgacttcttttcctctgcgtagatacccagtagtaggattgctgaatcaaatggtagttctactttagttctttaaggaatctccacactcttttccatagtggctgtactagtttacattcccaccagcagtgtataagtgttccctgatcaccgcattcgtgccaacatctacttttattacttttttttattatggccattcttgtagaagcaagatcgtattacattgtggttttgattgcatttcccttatcattagtgatattgagcattttttcacgtatttgttggccatttgtgtatcttcttttgagaattgccttagcccactttttcatgggattgcttgttttttttttcttattgatttgtttgagtttgttgtagattctggatattagtcctgtgtcagatgtgtagattgtgaagattttctcctactctgtgggttgcctgtttactctgctgactgttccttttgctgtgcaaaagctctttagtttaagtcccaactatttatttttgtttttatttcatttgcttttgcattcttggccatgaaatccttgctaagccaatgtctagaagggtattttccaaaaatactacaatattttctagtattttgatagtttcatgttttagatttaagttcttaatccatcctgagtagatttttgcctaaggtaagagatgaggatccagttttattctcctatatgtgactagccaattatccaaacatcatttgttgaaaaggtgtcctttccccactttatgtctttgctttgtctaaaatcagttggttgtaatatttgggtttatttctgggttctctattctgttccattggtctatgtgcctattttcgtaccagtaccatgctgttttcgtgactatggccttatagtacagtttgaaatcaggtagtgtaattcctccagatttgttctttttccttatttcttgctttggctatgcaggctcttttttggtcccataagaattttagaattgttttttctaattatgtgaagaatgatggtggtattttgaagggggtggttttgaatttgtagattgcttttggcagtgtggtcattttcacaatattgattctgcctatccgtgagcatgggatgtgtttccatttgtttggtcatctgtgatttctttcagcagtgttttgtagttttccttgtcgaggtctttcgactcttttgttaggtatattcctaattattttattttttattttttgtttttttggcagcaattgtaaaaggggttgagttcttgatttgattctctgcttggtcactgctggtatatagaagagctactgatttgtgtacattaatcttgtgtctggacattttgctgaattcttttatcagttctgggaactttctggaggagtctttaggtactaaaatctttagggttttcaagttaaacgatcatatcatcagcagacagtgacagtttgacttcctttttaccagtttggatcccctttatttccttctcttgtctgattactctggctaggacttctagtactatgttgaagaggagtggtgagagtgggcatccttatcttgttccagttttcagagggaatgctttcaacttttccccattcagtattatgttggttgtgagtttgccataaatggcttttattacattgaggtatgtctcttgtatgctgattttgctgagagtgttaattataaagggatgctggattttgtcaaatgctgcttctgcatctgttgagatgatcatgcaatttttctttttaattctgtttatgtagagtatcacatttattgacttgcataaaccatctctgagtccctggtatgaaacccacttgatcatggtggattatctttttgatatgttgttggtttcagttaactagtattttgttaaagattttagcatctatgtttatcaaggatattggtctgtagttttcttttttggttatatcctttcctggttttggtgatgctggcttcatagaattgattagggagggttctctctttttctatcttgtggaatagtgtcaaaaggatcagtatcaattcttctttgaatatctggttgaattctgctgtgaatccatcaggtcctgggcctttttttgttggtaatcccttaattaccatttcattctcactgcttgctattggtctgttcaggttatctaatttttcctgatttaagctgggagagttgtattttttcctggaatttatccatctcttctaggttttccagtttatgtgcataaaggtgttcgtagtactcttgaatgatcttttgtatttcagtggtgtcagttatagcatcccccattttgtttcttaatgaagtaatttggattttatctcttctattcttggttaatcttgctaatggtctatcaattttatttatatttttaaataaccagctttttgttttatttatcttttgggttttttttcttttaattttatttagttcttctctgttcttggttatttcctttcttctcctgggtttgggtttggtttgtccttgtttctctagttccttgaggttttaccttagaatgtcagtttgtgttctttcagtctttttgacataggcgttagagctatgaactttcctcttagcaccgcatttgctgtatcccaaaagttttgataggtttgtcattattgttgttcagtccaaataattttttaaacttccatcttgacttcatttttgacccaatactcattcaggagtagcttatttagtttttatgtatttgcatggttttgaaggttccttttggagttggtttccaggtttattcaatgtggtctgagagagtacttgatatagtttcaattttcttaaatttattgaggcttattttatggcttatcatatggtctatcttggagtaagttccatgcactgttgaatagaatgtgtattctgcagttgttggatgaaatgttctgtatatattggttaagtccatttgttccaagtacagtttaaatccattgtttctttattggctttctgtctggatgacctgtctagtgctgtcagtggaatgttgaagtcctcactattattgtgttgctgtctctctcatttcttaggtctattagtaattgttttataaatttggtacctccaggagttaggcacatatatgtttaggattgtgatattttcctgctgcacaaccttttttaccattatataatgtccctctttgtctcttttaactgctgttgctttaaagtttgctttgtctgatataaaaatcactacccctgctggcttttggtgtacatttgcatgaaatgcccttttctaacactttactttaagtttatgtgagtccttgtgtgttaggtgaatctcctgaaggcagcagatacttggttggtgagttcttatctattctgctgttctgtatcttttaagtggagcatttaggtcatttacattcagtgtcagtatgagatgtgtggtactgttgcattcatcgtgctatttgctgcctgtgtaccttgttttttttgtttttggttttggtttttatcttgtatttttgttttataggtcctatgtgatttatgctttaaagaggttctgttttgatgtttccaggatttgtttcaagatttagagctccttttagcagctcttgtagtgccagcttgctaggggccaattctctcagcatttgtttgtctgaaaacaactgtatctttccttcatatgtgatgcttagcttgctggatacaaaatttttggctaataattgttttgtttgaggaggctgaagataagggctcaatcttttctagctcgcagagtttctgctgagaaatctgctgctaatctgataggttttcctttataggttacccagtgcctttgcctctcagctcttagaattctttcttttgtcttaactctagataacctggtaacaatgtgcctaggtgattatttctttgcgatgaatttcccaggtgttctttgtgcttcttgtatttagatatctaggtctctagcaaggctggggaagttttcctcaattattccctcaaatatgttttcccaaacttttagatttctcttcttcctcaggaacaccgattattcttaggtttggtcatttaacataatcccagacttcttggaagctttgttcgtattttctttttttttctttgccttcattgaattgggttaattcaaagaccttgtcttcaagttctgcatttctttcttctacttgttcaattttattgctgagactttccagagcatttttcatttctatgagtttgtccaatgtttcctgaagttttgattgttttttctttatgctatctatttccttgaatatttctcctttcacttcttgtgtcgtttccttgtgtcagatttccttgcattgggtttcacctttctctagtgcctccctgattagcttaataactaacctcctgaattctttttcaggtaaatcagagactttttcttggtttagatccattgttagtggactagtgttactttggggggggggtgttgaagagccttgctttgtcatattaccagagttggttttctggttccttctcatttgggttccttctcatcctgtcagagggaaggtccattgctgaaggctgttgttcagattcttttgtcccacaggatgctcccttaatgtagtactctccctgatttcctatggatgtgattcctgttagctgagctgaagtgattgttatctctcttctgggtctagccacgcaacaagtctacctggctctgagctggtactggggattgtctgcacagagtcctgtgatgtgaaccacctatgggtctctcagccatggatactagcacagtatttggggtgtctcctgcgtcctccaggagccgtccacttccttcagagggtctgtgggtcctctcaggattcctggttcattcttgaagtctagatctattttttaataggctaatcctaaaaccatttactaagtaacattctttttttcattgttctgtaatgcttcctctgttgtaaattaagatcccgtaaatgctttagtctttgctagactttctttttctcctgttgttttaaaattttctctcccaacaagatatcatattgtgtaagtactatatgttcatagtaagcatttttatctggtactgaataatagtgagaatgcttcaaaatttcactttaagtatgctattaggtactgtatagctttttggctgacttatttttgtcaggttaagaaaactgctctctatttctagtttattatattagcctataaataatggtttttctgcacagtagaataatcatttgattcccacttttaaattattaatgcagtagattatattggtagatctgcctggtattaaactatccttacattcttgatctaaagcttatttgaatgggatgtgttactgtattctctctctcgctctctctctctctgtctctgtatctctcttcctcttttcatctctcctcgggaacatcttaaagcatattttggtaaatttgctttttatagttattgattttcagaaatatttctttgagaagttaaaaatgcaaaggttttatttcactttgtttcaaatatagtaattatctacaaacaagaatcgtccattttctacctattgagactcaaaacattcacagaacataaacctacttgtttcaaatatagtcgttatctaagaataaggattgtccattttctacatattgtgaatgaaaacattcaaagaacataaggccaaaatatctctttcttttggttctaacctgtgggaagcctgtcacttttctaaaagtcatgatcaggctgagcttcactccccnnnnnnnnnnnnnnnnnnnnnnnnncttgtttttgttgtctagaattaactttcatcttctgatccacatgaaatttgttccatgttgttttttacaagcaatatctagttgaattacccaccatgttttacttttttctcaccattagttcattcgtctaataaattcttattgcgtgccttgtgttggcctgctattatacatgcctggaaatataggagtcaacaaatgtgtctctgaactcatgtagttgacaatctaattagagaacaaagatgataaacaagtaaacaagtaaatatatatcaaaaataagtgccatggagaaaaaataagtagtataagggttgttatttatctaggttgtcaggcaagggcctgttacagatgtgtgacatttgaatgcatacttgaaggaagtctgggagaaaagtatcccaagtagagggaataccatatactaattgggatcttcaaggaacatcaaagcggccagttttgttggagcaggatgagcaagaagaacgtagcggtaaatggaggcagagatagtgggtgagagtggggttgagaaaaaaatcagataggactttcagacccctgtatatacttggtcatttactctaagtgagacaggatgccatgacagggccctgaaaagaaaaaggggacatgttcttattttagtgagaccaatttgagtgttgggaataaggagattcaaaagcaaaagcaggtaggccattaagaaactgttataataatccagataaatgttggtggcttgggtaagggagataaagatggagatgataagaagtgatcgcattctggatgtaatctgaagacatgtctgagaggattagttgacagagtgttagttatggggtatcagtgaaagaatagaggaaaggcctgagaatctgaaaagatgaaggtgatatgaaatggcctacagtcttgaatgagtagattaggaagtaaaattgaaagtctggttatgggttttataagtttgagatacctataaaacattcaaataaattattaaatagtgaactgggtatatgagcctgtaattcaagaaagaggtctggattaaagttattatttggacaacattgtcctacatatgccattagtgtcatgattccaaatgagataatctagggaataatcatagagaaaaaaggagaggaggataatttctggtgatatttcaatgctaagtggttgggaaaatgaagagaacacagtgaagttgaccaagatgaagtatttactgacatggaagaatcaatgcggaatgttgttcgagatacaaaattaagatagtgtgccaaagaagggggagtgatccgttgtggcaagtgttattcattggttaaataagatgattaagaatttgccgcaatgtggaagtcattggtgactaaagcaaaactattccattggtgtgggggagattaaagcctgatttgaataagtttaagaaattgagcaaagaggaattaaagacaggagaataagacaatttcttcaagaagttttgatttagaggggagcagagaaatgggtcagtaacttcatgggcagtaactgaaataggagaaaaggtcttttcctcttttttaaaaaggagagaattttagtgcacacttaaggtgattcttttcttcctgcaaaatttttcaaaattttattcatgtatatttctattccaatcgtttctggggtacaagtgatttttggttataaggttgaattgtatggtggtggtaaagtctgagattttagttcatccatcacccaggtagtgtacattgcacccaatatacactttttgttttgtccctcagcccccctaccccctcctcagtctccagtgtacattatgcctttgcatacccgtagcttagctcccacttataagcaagaacttcgtggtatttgattttccattcctgagttaattcttttagaataatggcctccagctccatccaagttgctgcaaaatacattatttccttccttttttatggctgagtagtattccatggtgtacatataccaccttttatttatccccttattgtttgatgggcacctaagttgtttctacatctttgcaattgtgaactgtgctgtgataaacatacatgagcaggtatctttttgatataatgacttattttcctttaagttgatacccagtagtgagactgctggattgaatggtagatctgcttttagttctttgagaaatttccatattgttttccatagaggttgtactaatttacatcactaccagcagtgtataagtaatcctttttcactacgtctataccaacatttattgtttgttttgggtttttgtttttgttttcatctttttataatgtccattctggctaggataaggtggcatatcattatggttttaatttgcatttccctcctttacgtattatttaatgagagtcttttggtggtaaagtatcttagttttcatgtgtgctcacatacacatacacagagtctttagtgacaggctagttgggtatcaaattctgaattgattttttttctctaatacttttaaagtttatttttgtcctggcatctgttgttactaaagaaaaatcttccactagtccatttgagttcattagtaggtaatctgcctcttattttaagtacttttaaagatttttctgtatcttgatgccatatgatagatctactttttattatactttacttagtaattactgtggacttttaatctgctaactcaattatttgattttataaaattatcagtaatgaccttttctataactgattctttacagttgaattaaatcctctctttctggaattcccatcatatgtgtgttggagcttctcaatctaccctccaaggctcgtaactgctcttttaaatttttcagtactactgtcttaattaaaaaaaaaaaaaaaaaaaaccaaacctaatattgcagtgtttggcacagaagaagttcaaagtacaactttgcagtgccacgttgaccagctatcctggcattggttattctttaaagttatttttaaggttaatataccttgtcaggcagcaggtctcaaaacctagggaagcttaaaagcctaaaggcagcctggaaaaaatcaagctaattaaaatgctctttcccattttctcttcctcctatgccctcatccctaaagaatagtgatgaagccttccttaaaaagatatgtataaaatagcagaaagaaaaaggggatccagcaaacatgcgaagacatacttagataattcacagtaaatgttccaaataatattcagcctcactaattctcaaataaatgtaaaacaatggcagatcatttttatccattaaattagtggcaataggaggaaaagaacattttgctgacaattgtaacagtgaaattgaaattctcttcttgtctggtttgaatctaaattaggacagtttgaaagcaattgggtcatatctatgaaaaatctcataaacattctacccttccatgtagcaacattgcttctgtgaatcaaccattaggcaataaatggaaataacaaaccaaatttccccccacctcccaagagatgtttattgtaacattactgataatattgaaaaattagaagcagtctatatcagcgacccacccttgttttgactgtcacttaccataagaaaatattaggtctacaacgtaacccaacagccacacccatgagtcaaaaacttccatataaggaaactgttcaatccattctatttatttaaacacgccaataaacaaagctggttttgatccactaaactgatcctaaaacctaggagtaggttatgactcacagtttgaaaagcaccaatctgaatgtcctatgaaaggcatatgatggaatatgaattaaatttgatattcacaattttttattttgtttttgtttgggggtagttggaggggtactatgtttcctcagccagcaaggaagataatgtttccagataactccatataatggggatttactgtaatgataccagctctgttctactatgcccagtcattctcgtgtatctatctctcaatacaccacgggtcctttatggattcttttgtgatgtcttcaagctccctgtccactctcttgcaacttgtccaagctgatagaacctgcctgaatcactcaacatctgatttcaagcattttattttggtcagcctttggtattaggacttcattctcaatctaatcaattaatattagctgagctaggttgatttcatttgaatcaacaaagaattgctaaaagctgcatttcctagaaaatgtggcaatataattggcaggtacttgagagtctctaatgttaaatggaaaaaaaaaatgaaaaataatgaaagagacaactttttatatggagtctgttttcagttttatttggatattttgttagagacaaaaaaggaatcctaatatagtataaaataaatttctacataagcaagtattatgcatttgtaatcagaaaaaatatcaaaattagctctgtggaaaatgatcatcttgcaagcaagtatcatgtacccttcctcttgatttagctcatcttcttgatgtaaatatgaagtgtctgtgactgaaattctgtttgaagcagaaactttcatgtttgtcttacaaataccatctcagagtacgttgctcagtataaaacttattttgggggttgggtacaaaaacctgcaaggatatagtccaggcttcttttcccaaggtccttcactttcctactcttagtgtaaccattattttgtaaaatttgataagacccttaataacttggggtttgggaatttgatttgaagtaacatggctcagagtatcacctattttttattaaaccaaaaaaaaatttctatctgacaaagatgtgcatttatgtgggccttaataattcccccaaataaaactattcataagttctaacagttccaaatacttctggtttcagcacactaataggatttataactgtcttagataaggagcagtatcttctaaagctcatggaaaagccatatcagaatgccatgtgttcaggtacattatcttttctttatgatatcaagaataaaatctcggcttatgtttttacacaagtcttgtgtgattactctttcccattacttgttcaattgagcctgacaaatgaggtgaaaaaatctttctctttcaaggatgaactagaaagacctaggctggctggtcacaaaaccactgactagttggccctttgtctttttataacccctcattgtctgggatccaacatcgtaatgagtctcagacatgttcctcaagtctagatagacctcatccatgtgttcggtgatccagcccgtcagcatccaagccagcagtgtgagaaggggaagtgtaggggatgctcattgccctgaaggatgcatatgccacttccagtcaggtcctgctcgccagaacatagtcatgtgaccacagttagacacaaggttggctgagaaatgcctttcgctaggttctatttctaactgaaaataggaggagtgaaagttgggataactagtaaatatcagttagtccaagtcatggattgtggtattaattccataagcaaggaaagtcatttaaatgttttatgcagagggataccatgatgataattatgtttcaaagcgtgtttctgtgtgtgagagagagagactgaaagagagagtgagataaatggattagagagaatttgtctgggtattaagaggccattctcaaatccaagtgagaaatggtggctagtaacagtagtgaggataaagagggatggaatggactcaaaagatacagaagagataacatcaaaagatgaaacgggtagaggaggaagaaaagacatccaactaactcctaagtttctgatttatactgcaaattctggagatcaggtgtttatggaccactgagtttagttttagaaatgtgctttagaggtatttgtcagataggtggtttctacacattcaaaataagatttcaaaacatattagccacaaattcacaatcagcaaaattctcaaatttggtcattgtcaactaaactattaaaatgaattttcccctctgagtgtttctcatcttaaagggtttgtatgtattacatgtcacagaacggtttattgcatataaacatgggaaagcaagccaggcagaagaagtcttgtaaccagctaaaggcccagctaataaatcatgaacagtcttcttgtattaatagtgtggacaggactgttggtcacacacaggaaaatgagtcacacagtcttgtgtgtacagcaactcactccacactcagtgatgggaatgattgttctaaccgtgtgagtggctacaataattatggcaaagctccagagctagaaagctggtcttttttttttttcagtgtcactcgagtatgtaattcactaaatgtttagtattttataccttttagttgacttgtgagcgctttctaaaagaggtatatttccctctattagaaggtaatcaaaaaaaccctaaactgcattttctaaatgctgtgttcttctgcccaattgaccaaaatatactcagttgattaggactttgaagggttggggtgaggggactaaattaagatgcaggaatttcagttttctaggggttttctagtcaactactttatactgctgacaaatggttaaatgtttacaatgaaactaagtatgctaggatttctaatgagcaatgaaattttagaattcatttactcattaattttttcatttacaagatgtacaatgtgctgtcttctgggcatttgggatactttaatgaggtagcagtgagtacaacggatggtcacttctgcctttgttcttctactctttagagaagggaaaggaccaagattcagataccctatcactgctttcaacccatccacatcagagcctttgttgagttctaatgcttagccctcttctcagctaatttggctgcctccattgtaataggcctcatgagactccagcccaggcctggcctttggttcagcaggcagagcccagagatgtactgggcaaaggtcaggggatttattatatgaggcaatggtcgggtgtgatttaatttactcctctggtaccagatatgtgtgtgtgtgcatgagagagagagattgaggatgattgattttggaggaatttttgtgaaggtttatatatcaaagcagaaagaccaagaagttagagattaatacatgccaagtcgtgaccaagaaacttctgtgggatcccacctccaacccctccctctctgccagattttaaccaaatcagtgtgatgtgatctgcttgcatatatgagtgaaagaaaaaggaaatttaaaaagttcttgatataaagcctggaggaaacaatacgaaaatccagcctctatttcagcaatatctgccggactattggttagtattcccttactgttatttattgtttgattaaaaggctgatagtcagggttttgttttggttttttttttctacttactttcgcattttttagatataaatctttaacgtggctttgaccagatgttttcctttctcctcccacttcattcttccctcttctgggttaatttctctcattgttctctcttccctttacttctctgcccttttcctttctactctaagcgaaacttctattttcgtgtgctggagtttataaagtattcttattaggcaaagaaagcctttggctgccctcctccttgtctggtcaccatcaagatataattttggttttcaaaggttgttctctgaaggaaggactagttttctgagcattgagacagcagatacattttgagaaagtcaacagggatggtaatttgcattaagtaggaaatacttaagggttttaattctgttccatgtgttacatttcaacagtttacattaagaaaagtattgtaggccgggcgcggtggctcaagcctgtaatcccagcactttgggaggccgagacgggtggatcacgaggtcaggagatcgagaccatcctggtgaacacagtgaaaccccgtctctactaaaactacaaaaaaactagccgggcgaggtggcgggcgcctgtagtcccagctactcgggaggctgaggcaggagaatggcgtgaacccgggaggcggagcttgcagtgagctgagatccggccactgcactccagcctgggcgacagagcgagactccgtctcaaaaaaaaaaaaaaaaagaaaagaaaagtattgtaaagaaaagtgatacaacagttgcatgtttattttgtatgtttagtctgagagatggtcagtactttgaaggaaagagaaataaggctttgtctcctgcttcttcttatacctctttgcagattaactctgatgctttgagtgtcttactgcattgcctgattaaaacccatcccataatgcctgatgtgatgggaaacaccacttactctatctcaatggaaagcattcagatgaactttcaacagaaggacatgctcccgcctcttccaaacacctcttttaaaaccgtgtctatgggcctttcttcatgtcttcaacaatttgtttaaaactggttgtgctaggtagtgggcaatataaagatgatcacaggaaagagatgacaatatcactgattccttatagtgctataataagggtttgtcaaggttgtgatagaagtagagaggagaggcacctgacttcacttgggtgtggggtttttgctaaggtgcttctaagttgaagtgtccttgagctgaggtttaggggaatgagtagcaaagatggattaaatgagaagaggataggcggcagcagggccagaggtgtgaatagcctggaaccttctgagaagattcctttgtagacagaagaaaggggagatttgtggaaatgctggaagataaggtaggaagaggccacatcagatcacacatggctggctgtacctctctaaaagtttatgatttgtactggggggtttgaaacagaggctataaattggcagtttaagaaaatcactgtggtgttagtgggaagaatagattttggcaagattctaactaggattattttcaaaaatttacgcccagtttagtccagatgtcagggctagtttggagtaaatttctttctttaattactccagggctcttgtattgcttcagagaaagtagaaaggggaactcaccctcattcagggagggtaggcgagcgaccagccagctggggaaggccaaagagccaggtcaccttgtgcccacacttgttatgatttgtttgtactgtctgctggatgatcaatgatattagctacgacagcacatatgagcccggggtaagtgtgtcttcttgctacttgaagtgcttcttgaaaatagtgacaggctgaagacaacacggaatactgaaaaagcccattggacaggggacaggagacctggtgctgctcccagcttggccagcaccagccccgggggcttagacacattacttcacctctctgggcttaacttacccatttataacatgcaacctttagactaacactgtcctcggggccttgttcagcccctggcttctgtcattgtgattctgcgccccccagggtccccctgggccccatcactactaaccctaggcttctagacatgttgattcatagagaaataggaaagccatttatcttcagtgagtgtaagccagaagtacagttgtgtcttaaggaatctaatctagtgaacatggaaaatacttttctaaggaaaaaaattgtgattggtgttctgtcctgagctgatggcaaaagggaagcaggaaccacttcatacatctcaatccctctgttttttcctttctatcctcttgaatttttcggcctgttcgtctttcaaaagtggagaggagtttgaatggggatgctgaggacactgagggtagccacctatggaagaggcttgactgggaagccgagttctgccacctgacaaaggggcacgtgttcagtgtttatttggcatagcagctgttcaggtggagcccaggcagaattttgacgtcgttgggaccttccatacctttctgaaaatctcttgcaccaacacccggcaccctcaggttatgttctgcttcccaaagttcatccccaggctcaacttctaaccctcttgttttctcttttaccagaactaacttctaaagatccagagacaacaactagatggtggtctggatgttcctgaggtggaaagagaacctctagtgcctctggctgacattgtatccactgacaggtcccctcccacatgcatacatgtaacatgtttctgctcacttatcaaatacagcccatgctttgatgattgaggacagagtggggattataagttgatgcagtaggtctgtgtcttgccctgagaacttcacaaacagcaacacaggcaccaagaactcatcactcatctgttccacccacaggggtttatcatcttgtgacttggatattgtggaatattttatagtaaaggttaaaaaaaatcagtgtaggcacagaggagttaacagctacgttgcagtggggagtatggaaggcttcatggaggtggtgatatttgaacgtgactttgaagggtaggtagagtcctgacttctctgacagtagccttgaaagtaggggaaacttgaccatgaagaaggctgttgaaagtctggagaacagaaaaggtaggggactaagactctaggagaaggtactacattccagagagaatacagaagtataatcctccctcatggtgacaagttaaatgtgagaagggatggactaaccaactgggtgaaccctgatctcattaagcaagataagaaatagaagaaatgaatctgcatgttcattatgtagggatcagaagcaggtaggaaatgccgactttattttagacagaggttattttaggtacctgtgggcatccaggtgtattatttccctatgtctgaagcacatgtcctttggttctttagcattttgatgatgatgctacatgtaaacttccccctagggattttctgtaagttttcttcctcattcgagagtaaagttttaactggtaacatgatcacaagtggttgaaaagttaaaatgctagtcatataacttttcaatgaagggagcatgaatggtttggtactgttttacaagatgtgaaaactgatttcacttaagtagactgtaacataaagtgcttatgtgtctgtccctttgactttctggtaggtgtacagtctctctgaatcaatagtggctcagacttctgatttcaaacctcttcgggcatccaactggtttgggagaaacatagccaggtcattgaattataatttcctgagttatggtgtggtggtcccataggacagtaaacataagcctcctgggaactgaacttttaattcaggaggactgaaaacaagctcttctgagtcaagatttgcaaggacatgtgacaaagatagactggccttcccgcttccacaccatcttttcctccataaatacgtgctccttatttttcttctaccctagtctgttgtagattttgaccttggctgttactttcctaccaacacattgcctgtttttaagtttcctggtttgacctgatgttaagatggaaagcaaggctagcaaactgatggagatagagccttccagcctttctcactttccctgggatcatctcatgttgatttacatgttcaaaaaaattttttaaagaaataaattgtatcagttgctccagaggtgattagactctaggggcctgatttctcttagccaaacttaagacatgggccaatacaccaaaatgtcaatatatttatttgtttcgtattgcactgtcaagcaatttcatttcatctgattattgtgttcattttcctgaaagatagtgatcccagaaaacaagaatcagaaggtcatttgacaactgtggagttgaaatagagggaactaaatgaccttagggcatagcatcatcaagctttgagaaattattgtacctgtctctgtgttgggacattctttttggtcccaggtagttggaggagacaaagctgtaaattatttactagtttttcaacatttccttatcgtttattgttaactgacggaactatattgtctctgaagtcccttatgaataaaattgctagacattgcaaaaatgtccctctcaatattgacatgtttcagtggtgattattatcttcctgattaatgtttacggtcaatctcaagctctataatggactcttaaaggctgtagcagttttctattgcttccataacatattaccacaaactttgtggcttaaacaatacccatttattgtctcacagttctatatgtgagaagtctgggcacaccatggccaaactgggctcttgcttagaatttgcaaggcagaaatcagtgttgttaggacctctagggatgaatttgcttccaagccgattccagttgttttcatgaactgagttccttgccattgttgaactatattcccccatttctttgctggctgtcagctaggagccggtttttgctccttttactcctgtctgcattgcatctcatggtttctgtgtgcccccttccagcaacaagattctatgtaccctcttccagcaacagaagatcaagtccttttcaagtttctaatctctctgacttccccttctgccatatctcattctgcttttacaggctcgggtgattacatcagtttatgcaggtaatccaagataatctccctattttaaagccagtgggttagccatcttaattacatccacaaagttccttcacagcagtacctagattagtgtttgaataacctgggatggtaatcttgcaagggatcttttggcattctgtctatccagtctcatcagcaacactttgaaatattgtcgttacttgagtgatcatttctgtgactggctgatttcatctatacatgtatattatttttatttgccattttgtagggtaatattttctgatcttaattccatatttcagtattaaaattacttgacatagatccataaatcatcatctgttgcaataaagcacattaattggttggtagaatggggagactgatatttcttttctcttcttcttggatgagggcaacttttgggggcagatgagttctgttgtgacaaaagttatatagcacatttggtttgcactgaatcagcgattctcaatcctggccatgctttagaattatacaagaaaaatcttcaagtatcaatactcagtccctaccctactgatccaatttatctatgataaagccagagcattgatttttaagttccccaggtgattctaatatataaccaaggctcagaactactgatatgttccaacattctgttttggagataaagaagttgaggctgaggatgagaacttagtcacataaagtccataactagtgacagacataagttctgtcctacaaaaaaaaattgatggtttaattgtatgtagagttcagtgctcagtaattatgtacaaagtgagtggttgagaagatctggaacaccctacttcttgctttagtaggaagactatttctttctatgactttaaaaaattatcagaccttgcaaaacaacttatgaaggtctcttctcagcagctttggcctgccttgtgagtaataataaacacagatccattttacactagctaggaagctggccgcgtggacttctcctactcctctgtgttccagagcttcatggtacaatgcagtagccactagccacatgtagctattgaacacttgaaatgggactagtttcgattgagatgtttgtgagtgtcaaatgcatactagaatcaaagattcagtatgagaaaaacggtgcaaaatatctcattaatactttttacattgattacatgatgaaataatatttgaatatattgagttaaataagatacattattaaaattaatttatcaattttttaacttttttaatgtagttactagaaaatttacaactatgtatgtggctggcatttgtggctcacattatatttctgttagacagcacttttctagggagtattttctattaaagctattgacaatgaatggtccaagtccaagctattatacctcctttgatcttgaagagtgaaggggtacattataatcttcctggagatgagacatgatattgatctgccctgtgtttgccatctatctggcagccagtcagtctggccaaatagacttctatttttacatagaagcttaaaggaggcaggataatgccccatgtcatggagagagcatactgcatagctcttaagtaatgtacccaaaagtagaccaggtgctattggaggttctaaggcatagcaataaatattacatcccttgagcaatgtaatacagcccttgaagaaactgccatgtctttgacaggccctatgcactgaaaatattatgatgtctacctctctttataattcacatctaaatattactctttttcttgctccctgtagtttgttctgattcactgctaccctgattgtgtgtttagcgtgcctacttcacaatttaagagtcatgggaaagtaaaggcaggccttggagagatcaagcacagttcaaaaccctacccagagatattctgcctgtgtgagcttgggaggagatttacttaacctctctgagctcctctaaacttccattttctcatttgtgaaatgagcatttctcttgcaaggtctgtgtgaagattgtatgaaataagaaggttcctggcacacttatttgttgggtagatattgtggtgaacatctactctgtggcaagcccatggctaattgttagaatgtaatcgtgagtgagacacagctactgcctccagctaaaagaagagaaagacaaggaacctagtaacatcaggacatgaatagtcatcaatgaatggcagttattattacacagcacagtgcaggatttggcttataacaaaaatttggaagggtgttcaggtgagggaattgagacccatagtgattaaatgactacctgtgtcaccagctcaggcaatgttgggctggtgccaggttacgggattgctgactcctcctccagtaatgctttccccaggagatcacattgcctcactcttggtttcccaacttgtttgctttaaaagaataaccttgccatgttggacttgataaaaggaaagaggggtttctcccaatttttgctccatatgttattcgggcatgctagtaactgtctttgaaaacctacacttctgttatgttaactccaaagaaggcagcaacacgtgcacttctttaagatataaaaagcatttagtatactataaattattatagtaatcattgttagattatatctcaccaagataatgaatgttttcatttgaagacttcactgtatgagaacttgtctcctatagcttatttatctccttttagattaggtgaaacagaattttcaaatttgagtctgaagaaaattccaacatctttaaattcgtttaaggagcattccccatggtctatatgatctatcatagtaattaaaaaatcagattttagaatgagccacttgtagaaagagaaaaaaagtagaaaatcaataagaggtttcatttttcaaattctgctttggaaaaaattacttggtagggacaatagtgtaaagtaagatataagaagaaatatatcattcaaataagcggccatgcagttggttatctctttcatgtaacagtcacatctgcattgtgaattcattaatgcaccaagtgaatcaagcttagtgagttgacaaacatccacagggatagttgcggggaggcattgcaaagtgcaatgtgaggtcctagtgaaacagaatgcttcgttctttgagaaagttccactctgaatagaaaaactatgcataccaagatcggagtatggccaagcatttggctactgaaatgccccttcttctttcattcctccataaaggaagagacagagactcaggttcttgtaactcagctgccttttttgagttctcccaagagacgttctaacttcaagccaagcatcttgtcactgggatttctgtatctaatttttagttctagaaatccatgatttcacaaaacaaattatctgaacctaacaacaaccacatagaattttcttaaagtagacgagggaggaattagcccctaaagtatttcctacacaattggaactccctttagaagatgtgcaattgcctgtacacccaagcacaaatgggctgtattattgccttatctaggatatacacactttacattataatggtccttccctttccctgaacccgcatatgatgtaagtgcttgatttaggaatagttacatattgtgactggcgaaaagcacatttgctgattgctctgccacctgcctagatgtatatttatatatcatgaagatatataatttatcttttatgataaattataataaaagataaagatatgtaatatatcttgatatataaatgagggtccctactctcagtataccccgtaggaacattataaaacataaatagtctgttgttactactaccaagaagactttagtaagtgtaataactaacccttttggatacatgcagagcgaatgccaaatgctttaaataaattatcgcatctaatcctgatttttttatgaaaaagggaaaatcttatcatatcaatattagagatgagtaagctgaggtttgatagagctaggattttaacttagctctctgtgactccaaagcacattcacttaaccccaacctcaccctctctgtaaatgaagattaacaatagcatctgtggtagaagctaatgtctcctgatctgggaaagtatctttcaatgattattaactaaatgtgatcagctgccactggatcagatgtcatcaaatgaaattaagtgtccagggtttactcaacagtactgtctcttacgttttgtatcaatgttagtagattgcttaatttttgtacctgttacctcacatgaagcctagatagcatcagtcccttccccagccagtgtgtactgggtccagcttctggcttgtgaatccaatcagtgaattaatgttggtagcttaaaatcagccttgaaagaggtatttacaccacagaaattggcaaatgatacaaatcatgaccctttttttaaattccagagagacaagtgttaaacatttaccagtacaccactgtctgtgactcaaatagggacataatgtgaataattatacttctgaaggtaaatgaatgcacactgggtacccttgaaaaaaacaaccttccacagatacaatcatacctaagtcacctaagtctttagtgaatatttttgtccccatcattctgcttttgggaggaccttttacaacataatcatgatgattttacatgtcttttgaatttttaaaaaattactttatttgttcatttttgttacaaaagcaaatatgcccacagtaatcatttaatgtttttgaatgcaagtgcatacatataaacaataaaatgtatatatgaatgctgccagtagaaataaaatgcaagtcacgtatgtcatttaaaattttcaactacagtcatgcaccacataatgacttttcagtcaatgatggactggccccataaaattataatatcatgtttctatgatatcttttctatgtttagatatgtctagatacataaatacttaatattgtgttaaaattgcttatggtattcagtagagtagtaacctgctgcacaggtctgtagcccagagcaataggctatcccatatagcctaggtgtgtagtaggttataccatctaggtttgtgtaaatacactctgtggtgttcgcagaaccatggaattgcctaatgatgcatttttcagaatgtattcctgtcattaagtgatacatggctgtaatcacatttaaaaaaataagaagaaacagaggattttgttttaataatagatttcatttaactcagcagtcaaaaatatgatttcaacatgttgtcaacataaacattatgaagatgttttgcatcttttcttcttgtactaagctttcaatttcatgtatattttatacttatagcacatatgaatttggacgctaaattttaatcataaatacttgatctgcatttacatttcataaaatgtaaagcttaaaaagtgggttcatatatccaacatgttccaaatagacttacatatttaattaaatttaaattgtcattaaattcctcaattgtgttcgccacattttaagtgctcaatagacacctgtgacttattgtaacagaattggtcagtgcaggtatgtaccatatatccttattttataaaattggagacctaggttggatgtggtggcttatggctataatcccagcactttgggaggccaagacggaaggatcaagtgaggccaggagttagagaccagcctgggcaacatagcaagacgctgttaataaaaaaaaaatagctaggtgggttggcacatgcctgtggtacaagctatttgggaggctgatgaagacggatcccttgagcccaagagttggagactgcagtgagctatgattatgctactgcactcccaacctgggtggcagagtgagacccatgtctcttcaaaaagtaaaaatacaaataatataacaaataaataaataaaattggagacctactatatgtactactcccaaaagtctttttccccctcacaccttacacatttaaaattcccatcctgcattccccactggatctccaagaggagagaaatctcagcaaaagtagttctatcaaaactgtctgtgagctttcctcattcataggaaggaaataaattcacctaaggcattttagatctgaccattttccaaattatcatcaccataaaaagttggtaacaacatgaattctgaaagcaaactatttcaatgcatgcttggtgctaatgaaaaccagcagttttaaatgcccttttgggttaacctcttccttttcctgtgctgtattattggaaaagcttcagcaaggagatcgactagattcaatttcacaatatttcttagtaatcaatgctggcatttactcttcccatctattaatatattaacatcacacttctaaggatgcgtctaaggatgctttaatcacttttaaaaaaatacttgatacaaattagagggtgtccgttattttaggtggtggtttgttttatttccacaaaattacaaaccagatataagcatatttttccctgtgtggcttaataaactttttttttttttgagacagagtctcactctgtcgccaggctggagtgcagtggcgcgatctcggctccctgcaacctccacctccatggttcaagcgattctcctgtctcagtctcccgagtagctgggactacaggtgcacgccaccacacccagctaatttttgtatttttagtagagacgaggtttcaccatgttggccaggagggtctcaatctcttgacctcgtgatccacccgcctcagcctcccaaagtgctgggattacaggcatgaatcaccatgcctggcaaataaacttttaatataattgttgatgaaggtgttatggagacttgtcaccataatagtctagtcttctccttaaattcacgtgatactcctcatctctatgtagctctccctcaccttcagtaatgacctcccttgtctctcaatctttggtctcttaccttcaacttcccactagtcgtttctcacatttccaaaagtcttataattgccttaaaacaccaagtatctgaagcagtcctatgaccttctcctcccgctaaccaactcagatccccaaatcctgatttctttcactagcactatctctcatccacacatacccagttatttgtgacagacgtgtctctaccatctctcatatccaatcatcaccaaatcttgtcaatacttctcagtgatattaagttaagaaggcatgaagggcagctgtaacctaaggaaaacccacttttgcaccaaatctctagtgactttctgatcaatctgagttgaaaatgctgtttttttttgttttttttgtttttttttttttttttgagacagagtctcgctctgtcgcccaggctggagtgcagtggcgtgatcttggctcactgcaagctccgcctcccgggttcacgccattctcctgcctcagcctcccgagtagctgggactacaggcgcccgccacctcgcccggctagttttttgtatcttttagtagagacggggtttcactgtgtcagccaggatggtctcgatctcctgacctcgtgatccgcccgtctcggcctcccaaagtgctgggattacaggcttgagccaccgcgcccggcctgaaaatgctgttttaatctggtcctacctcaccaatctaattttatgcccttttattcgtaaatttgaaccttgttctctattcactagcttcctcagaatatcgtccaaaacatactcagaattcatactcacatccagaacatttgctctgagcttttaccatacaagttgaccatagtttctctcccttttccactcttatctgtcatctagttctaattttaagactgtcaattcgatacctgatttttccctagtctgaccttctattttcagatatgccccttcttttcacagtttcatgtgtttgtactgccttattcttgaagaaccatgattttgattgcttttgcgttaatctccgtagtgccttgctcagtgctagcaggaactagtagtttaacaaatacttgctaattataaattaaagagaattaaacatattggtttctttgtcaggagttggttatagcatgctggaaaatgtattatatctaaccctcatcttttctcatgtgtttacaaattgttttatggccaaagaataagttagtatatcatgggcctaattatgtgattcggaggcctcctctgctgggcagtctacagatttaaaattcatgccagctgcattacactggttttgaacttgctttttcttgagaaagatgggaagcaggcaaaatgcctcaggctttcagggtggaaatggtgtgagttccattatgcaagaatagaagcccattttttatcccgcctgctgaaaatcttgccatgagtctatagtcaaagaatgtgtaagtatcaaaagaaatttagagagggattttccctaggaaaatattgcaagcttaaaaaacccagggagctaaggtccaatttagtagattcctctgaacaatgccatcctctacttagattattatagaacctcttatgacggcatttgagtggactgctgtgtctctgggttaataggtacaagtaataagtttaggtacctgggcaaaaagggtttggtggaggggaatagagggactttctttttctcacatctggcatatcattacattgtaatgttagataacattaaagttccgaacttcatgtgtcagcactctgacctttcctagggacattttatctcggctagaacctaataaagattccctcatctagaaggtgccatgtggggctctgcaaacatggcgtggactgcttacaatacagttgaatgtcacttctcatggcctggctcatgtgaggaccctagagagagttctgcagaggagtgcagagggctacttttggagtcattcccactgagccaacatcagtggaagagaaggggaagagttaggttctaatcaagcacttagcttctgctgaatccatccacatttctttatcctcctcctggcccctggtcttagttagagttgggtccctatgcggtgttccaggaagcagtaaactgcactcacctcctatttgggagcatggcaattttaaatattattttctcctgtaggagtatgcaaacagatttctggttaattttgtgttaaggattcttgtttgttttttgttttgatagagcacattctatggacatatgttcagcttgtaaaggaagtgttataattatagttcctttttttttttttttttttggagactgagtcttgctctgtcgccaggctggagnnnnnnnnnnnnnnnnnnnnnnnnnnnnnnnnnnnnnnnnnnnnnnnnnnnnnnnnnnnnnnnnnnnnnnnnnnnnnnnnnnnnnnnnnnnnnnnnnnnnnnnnnnnnnnnnnnnnnnnnnnnnnnnnnnnnnnnnnnnnnnnnnnnnnnnnnnnnnnnnnnnnnnnnnnnnnnnnnnnnnnnnnnnnnnnnnnnnnnnnnnnnnnnnnnnnnnnnnnnnnnnnnnnnnnnnnnnnnnnnnnnnnnnnnnnnnnnnnnnnnnnnnnnnnnnnnnnnnnnnnnnnnnnnnnnnnttcaaaagtttcgggattggaggaaggtcatcaactattcaactgaagtaaatgccatttatttgtggcatctgccaggtatccttgagatgtctgaagaggtgacttccaaaccagaggatgtggccttctgagaaatgcaaacctgttcacaccctcgctcagatgggaagcaaaaaaggctgcctgggaattggggatttactgttataccctgacatcagaatagcaggtgctactggaaacttctttacctgatactaagtgtcttgggagataacaagtaaaattaacactgtatacagcatccagttcctcagtgttttcttcacttaaaaagaatcagctgggcacggtggctcatacctgtaatcgcagcactttgggaggccaaggcgggtggatcatttgaggtcaggagttagagacaagcctggccaacatggtgaaatcctatctctactaaaaatacaaaaattagctgggcatggtagcacacacctatagtcccagcaacttggaagactgaggcaggagaaccacttaaacctgggaggcagaagttgcagtgagccgagatcatgccactgcactccaggctgggcgacagagtgaaacaaaaaaagaaaaaagaaagaaagaatcaaattcaaagcaaatacttagttaccaacaggattgcatttttagcctataacatctttttttagccttttaatatgtttctgctggaggtttccagctttgattacatagcctgttcacctaggagtaaaggacatggggagggagagatgttcagtggttctcatttggaaagtagataaggatgatgcaaggccatcagctcaaggccttccaggttaggaattaaaaacatggatgttgtaaaaaccacaactcatatttatttgaaatctcaccattgacaaagtgtgttcacctgcatgtttacactcagtcctataaacgactccatgaagcagtgtatggaggagagttcctcatgcatgtgggtttgcacatggggattcagatgcaagaagatacttagtttacatagagatatgttttttattttatgaatataaaattatatggaacaaaaaaagataagtcctctgctgtctagaaattacagtacatcaagaattttatccctatgtagaattacacagccattgccagaggaccacatctgtaggaccatgaaaacaaacatctttgctcattatttcagcctgattagggataccatgaagggctattccattaggtcaggtttgcacagtaataaaaatgatgccagtagaggtcctggtggagctcctagtatgatgataagtgtctgagtaacttgtaaatagtgcaattttatggaaatgttgcagctaagctttaaagtagttggcattagttgttagacacaacaacagctctacaaaaggcaatatgctgagttcatttttgactagcccaaacttgcctcaaaagatccgggatgtggacaccctggtatattttttctagaaaagcttatttccttcctccagataaaggtgtatggtcactgaggtgtgtactgacagatgtgttgatctactctctccgttaaactgaagggctccaggtgtggccacactgggcttctaaatgcctagcaaagccacagatgcatccctcttggtgtctgaggtgttcacattcctgggtctttcagatctgtattcctcatgaaaataaaaactctctacgatacaatctgtccttgtgggtttttagttttactagggagtttttgttttcttttgcttcccgccttctttctgcttcccttctagttaaacctctttaggatggctcattagcactttgttttgagtgtgttgagctgttttgttcactgggaaacagatttatgaaatgttactattaccgtgattgttctgtttttccttttatggcctgtccagctcaaggccccatgcttgctgatactgctgataaggttttctatttccagatcaaattgaagcaaaccttactggccctgttactgaagctgtgcatgggggtcatttgctgtgaggtgtttctatggctttgagccaggatgtgaacatctctagtgttcatgttgtttcctgagacgagtactcacgggcagtagaatttattacaacctgctgtttgagttcatgaaaagtaggacaatatgagactcggggcaatgaaagacttactaggattccttctggaactgattcatcagcacattcatgtcttacccagtctttaaacagtatttcatgataatggtctgcttttatttgctgggctttaccttactctttttgtgattgcaggtcctacaggtatggatctctggcagctgctgttgaccttggcactggcaggatcaagtgatgctttttctggaagtgagcgtgagttctgcttttccatttccaccctcagtggtttgaaacaacactgaattgtatttgttatatccaagttttgtggatgattttattaaaagatgcaagttttacatagcagcaaataggaaacttgacttaactttaaaatcagaaactagtaggacttttccgtggatgtttaggaggaacgcagtagtcagtcaactttggcatctggtgttttcatgtcaaaaattaatgctacaaatcatgctgaggacatttatgttgaagaaaagccaggtctcttgttctcaggctctgggagaaatattgaagttacactgaagagttattagcttactgttcactcagttcatttgtgactaaggatatctagtctatttccagagctcagaattcaggcttgttaatcatattctctgagaaaggaaattgcaggtttcaaatgaatttcacctctcactctctgggtgattaccatttggctaagttgagggaagagacacctgaaatagttgaatgatatacccagaaattatgagcttccttccccatctctataattctccctcccttttttatatccctctcctggtagagaagtctcaatatgtataaactatgtttcatagcagacctaactaaaacaaggaagagtaatggaagggaaagtggagaagaatttttctgtcagaaagaaaactgtgctctctaaagggtggtgggagacctttttttttttttttttttttttttttttttttttttaatgagtacttgatacttttccttgcctgtgcttctacagaagaaagaaacaatgtatttctcccatgctatgacactgaatttagttgttactttaggagtgtctgactccccttctcaccattcagctcatgttggaaaatacagtttaacagcagacttagcgccttaagatgtcctccctgaccttctagccaaaaataaatccgtagtagtgagctgctgagggtgaccagagtcacttagaaaacgagaagagtaaaagatgttattttatctcttaaagcaatttaaaaatatttatagaaaagagtcataattgtttgaaatattttttggtctctctggtgttataatgtcaacattatgcaagtcaaacatggagagaattgcaggctccgtttcagcagcttttcccatggctggttttagaccctggttctgagccaaaaaattgcagctgagatcctctgctgttccaaagtcatggtggcttaatctctcgtttcttcattaaggtgactttcactctactgggcaagatttgaggaatttaaaaaacttgtgaaatgaaaagtatggcataggaaatctttaaagaaaatttaaaatgcatccccagctgagagattagagctcaaattacattttagagctagaaagtctgcacggagcatctgtttccactgcttcgacattttactaaacctttgagttcctgagtgaagagaaaacatcattagttgcttttaatgcttgatttttttctttttaatagttttgtttgattcatttatttgtttagggagagcagaatataagcaaatgcagtggtttatactaaacacaaatcacatatcctaccagtggttacacataggaagtaatttaacaaagaagaacatttttgtctcctttttttttttttttttttttgtcttgttgagctaaccaatatttctttttcctttggaatatgtgcatattccagaatcctttcttaaaatgatctaaagattaaggatggggtatgatgtttatgtaagaaggcatatgtaagctcattccagcatgtgtgtgcatgcttgcctctgtgtgtgtgtgtgtattctagttctggccacttatctaaggggttcttgggttcagccaaagttactgcataacatgacacgggtcagtctcagatgacatttatgggccatgtgtttgtttttctgccaggtctggattgtagccaaatcnnnnnnnnnnnnnnnnnnnngtagacgatgacagacctctatgcatagggaagggtggcacttgagcagggattttcttgtgggcagatgagcaattagaaatatactggccctgaaaggatttttttaaattaaatctaattgccctgtgggaaatttaatgagaactaaatttgaatagtgccattattgtgctagctaaagtgttgtaatagatattttctgtctctcatccttaacatgaagctctcatccttaatatgaagctctatgtctgctcctcaagccaattacatagtcttgaggagaattttttattccaaaatcaggaatgatccacaatgccttgttttcaaagggcttcacatggttgacctgtcaactgattgtatcaaaattgctgctgctggaatgatgttgctagtgagaaatgtgcataaagatctgatggataaaagtattcttccaaggagtgcctgttataaattaggtcgtatatctctactatttcagtcagtcctcccctgaatataccctttgacctcagtaacctaaggtggaagtaggcaagcccctgtcttgtagttcagtctagctaggacatgaggaatgtcttgaaattaatgagagactgtatatctttaaggtttagattgtgtgatgaagagaaatggtcaagatgccctgaaaaagaatagatcaaggtggactagaatagttaattcaacaaattcaatgtactgataattcttaagagtttcctattttcaaagcctgcacctacggctatgaggaatacattgattcttccctcaaggaacttttcatgtgttaatagatcaggcatgtacaccaagaattacaatatcaggcattgtatattaactatcaaaatggcttgaatcacactttatagaagtgatgatgttgggagggatacctcagctgtggtgaattacagcttcatgaaggaggctggcattgtttcaatagagactagaatgtcgggtttaagattttaaaaggctgagaagaacagaaggctattacaggaataacttatgcaataaagcaacaacataaacagaagtgtacaaatgtagatatgagatgtccatggagaacacttcattcacttactgagtgttttttatatatatatacatacacacacacacatatatatatatggcactgtctagtcgatggatggttctgttttagcatttaacattcaacgaatatttcttgagcacttacttcatggaaggcataggattaatttggccagggtgtgtggtacataggtgctatatttgtaattattccccttggaagcaaacttaggtcagtaggtttgagtcaaattatagaaggcctagagatagcaaaggcattatggaaaaggcaagacttgctgggcccttgaagaatcagtagcatttggagaggaagaaaagaaagaggaattgtatgccatatccagcaagtaataggcctcaatgttggaggccagagaaaactgctacctgcaagatggaatagtttgtatgtgtgatatttatatgtaacatatataatacctatgtataatattgatatatatttacatataacatatttatatttgtatgtgtgtaatacatacactatatatgtacatatatacatatatatgtgtatatatgtacaatatatgtatatagtatatatatatatgcatgccagttaggtgtggcttataggcaaagcacataattgacatcactcaaattctgcaaaagttgttatatcattctacacccttcaaggtaagagacttaggaatgaggtgccacatcctaagggaaccgagagccccataatgttttctgtatattttgaacatttttcataaacctatgcacactgacaaaacacttacttgaaagaaaagacactcctgttctcattgctatcagataggaaataatggcacagtggacaaaacaatttattttttaaaataaactctgtcccactacaggtgaagttccacagagccctgagaggatgttaagacatgtcggatatatttcatacaagtattcgagtcatggtttcagttagtaaacagtaatgaatgcatctgttaaatgtgttcaagaatgaacaattcaaggctttccattcacagtgaagatggggagaaaagccacagagcttttgattgctgctgtcttgaccatcatccagaggcaagaagaaatcttatggtgtgttctagtgctatggcctgtgtccatgtacatcagcaatcctctgaccccttgtcctcctgatattgcagactttatttgatgttggagttcagcaggtcacagcaagctgggttaatctagatggtgccaatgtagataatgacacaaaaaaagtctttcaagaagcttttattaagtcattttacagattcaaggaggaattttatgtatgtatttatttattcattcatgcatgcatgcatgcatttattcatctttttcttttagagataggaactcgctatgttgtacaggccccaaacagttctactagcttcacacaatctttcttcagtctgtagagtagctggcattataggtatgagccactgtgcccagtccaaggaagaattttgaatgtatattcctgcctttaaggagctcacagtctttagaagagaaaacagagaaataaacataatttaattgtgatcctcgtaggttattaaagggttttaatctaggtaataatactgttagatttttactttgtcaataatactactaataggatgaaagtaaattcaaaagggatgaattagaggaggaaggtgatgacaataggtcaggagagagataatctaagtgtggcaggggtgataaaaaatagatggatcaccaacacagggatgttagaaagacagagttaccagtactcagagtccaattaacctgtggatatttgacttggggaactatcagtgccttcttttccatccgtttctaagtttctgcatttttaattaatgtgatcatcagcaatgactcacgtttaatgcagtgaagtcctggtgcacagttcagcctattagcactaaagtggtacttgcacagaacagctctgtaggggaggaaacacgctgaggctggatgacagcagagtgtctaagctacgcttcttttgtaccatttctctgaactcctcatgcctgtgtctaccctgggtcccacagctctctgctcagctctgcagtatggctgtgatatagctcaggctactatgcagtgagggtctacagcaaggacaaaggtctgaactccctcctcattgtagtctctggacatttgtgactctatcccgagaccttgacaaccccccaagtattttatcattgctagagtatgtacttaactcatgggatgcaataaaatatatgcaggatgagttgagaacagcaaagccatgtgctgggcagagtctgggaggttggttaggctcccacagaaactgagtgactcacctctacaaagaagctggcagtgtgagtgattagatttatgccacagctaattagtaaattgaaggagtgggaccacccaagaatacttagaaccctgactgttagttaaattcacacatgccagtgatcgaatatatttctggtcttccacattagatgccagctcttatgggaccagagccagtcctggttatataatagaatgtttccacaccagtttggttcagtatcctaaattggggctcttgttatggggtagagaggaatgaggtcgacataatgtatttggtgtttggtgatggcaaagagtacctgttcatagacacacctggttgttcacctctggctagagaccaacccaagttcaactgtagagaagtccattttggtctttactggcccagccagcctctacatgagatcattccctacaacaaggggcccaggattcctcagtcaccccagcaccttttcctgaggaaaaccatctcatgaagaacttgccactgatgattttctcctacctgtgcattgaagtcagtgggtttctaactgagaactggttccttttaaaccttcttaaccttacactgtatatgatataaaactgtaggcagttcagagtcaccaataaagacatcttttggggtctctacttggcttgtaaccacctgcttatccacagtattatgcacctagcttgtcatcaggcagagtcaccagcagccacaacacaagggtccaccttcatctttccgaagcagcaggcagtgtcactccattttgacttttctggcaatactcacacggattgttaaataatgctgtcaacagtgtcatcttcaaacccaaagcaaagcttcctcatcatctgtagttagcagcataaagacggtgatgatgtgtaacataaacacactttgaaatctgatgcaattgaccctacgaagagagtattccttagtgccctgtctggcaactcctggagagaccaagaggccttgggccttagagcacttcttcagcctcagctgcaaatccattttttctagttccttgttcccaggatgaagccacagtgtttcatcagatacatctatcaggaatctctgtttctgtctatataacaatttaacttaagcctcaacctgcacagtgtatgcatcacatttccatggaaggattgcaggtattagaagatgatggatcatgtcttgaccacaggggaaatgtttcaggatgtttttatagaggctttcactaacaagcaggacatgggattggcagagaggtgggggtaggaggcaggtgaagggtggcatttgttgtgtgtccctcttctaaatgaagttataatgacatctgtgtttcaagcgtgtggaaagtttggattgagcttgaaataaatacaatttaattggtttcaaataactgaacaaaatgaccattccatgccctgtgtaataaaatgttatggaattaaaactaactagatgttaaaatccatgaaggatattttgcttgatgcccatccttcagcattctgatgaggatcttcatttatttgttgaattaataagtgaatcagcatctaaatcctgacctttgatttcctcagttctctcctgcaattgtcactgatgctctcatctccagtcctgagcaaggcaggagttgaattagtatccccttatagtgggaggggtctagaaatagctgtgccactttagaagctaggctttgtgggcttttcctggtgatggaatgattttattttcctgctttatactccagttaccaccaagatcagaattctgccctaaacactaatgtgtgagagcctgatgtccttcctaagtcttgtcaacctctttccaggtgactgaactccgaaccccatgcaccagtcaccaacattctgcattaagtgacccggtcacccagcaccatccccctgacaccacctttatctctacaccacctacctgattaaatctcctcaaatattgacagacataatgatgcctgaagatcccaaatccaaattttctttgcccctttggacattgaactttagattacaaaagaccctgactagggatcctgtggatagctgagtcaattttcttagccccattccttaaatatcaagtctttctaattttccaatgagagcacatcttgaagtatgacactctcaagttaaaagtcaatttatattaataaaatccttaatttcttgatttctgaatttgaaaaaatgacactttgtgtatcttttatttttctggcaaaaccttccaaatttgtggaaggagaaataatattgactactggataaccatgtgctatgtgtaaatattaacagatttgccttagtggacactgaattgatgatgtttgccacattatattttacagagccttggctcttccaaaaatgagaggtcatttttcaggggaggaccattttgtgtttggctaacatttaggacatataatttcttctcctctacgtgccactgacccactgcatccctggttggagcaagaagagccatgctttccttaataattgctgatggtgaaacgatgtattgtaataagagcagaggaatagggaaacaggagaaagatagtcagttgaagagtcctgccctgtgtcagggcaccgtttggccagctgggcttgctaggactaaaatatagaaagtacatgaagcttcatactcagacagctctggctacgttgaaaactggtatatcatggtgcccagctttctttgttagctgggccagcatcataccctctagtatttgctctgaacttcataagcatggttgactagctttctcttcctctgcagttgttattcagactgaatagtttctaagaaggcttttattgagaaatagaaggaggtaagttaacttctgtgcatatcttggccatatttgcttgagaaactgatgtgtatactatagccattatgggtgtgaaaggcaaaagtataagtgctctccagtatgacctggctgtcttgtcttacttctatatttgattgctaaaaatatatattcttaggtcaaaaaactcactttaagggaaaaaataaaagaatattaataaccaaaatagaagaatattaagaactttaacatgagacgtatttagattaaaaccatctctttttggattttggggggtgatttctctgtttgggactgggttgctattcacccaaaggtggaaacttttgatgttggggaatgccactgatgccttaaagcagaggataaaaggaaaagactgaaattccaggctaaaagaggagagtgtggccacttagccacaagttagcattcaataaatactgtataaattagagatatatttctgcagttggttgatagaagcttactatgatctgcctcaggatgcatcaaattcctctggtactttgatcctattattgactgtcacttccttgggggcagcagttaatcaagcagaggcttatcctgtcagagagtaaagggagctatgaaggagctcgctgggaggaaaaactggtcctcagagatgcttagggtttaggaccagtaagaggcagtctccacaccacccacatctgattcctgtttccttcttctctgctgtggtccggagaaacagtttagattaggtatttcagagcagtggtgttggactttgtcaaaactgcatttgaatcccatatatgaattgtgtgactttttaaaggttgagttccccagaagtaggatgctgaggcaaggattcctatgaaagtgaattattagaaaatggtccagggagaaagcgataggagagtaggaaatgagactgggaaggtaaagaaaccatcctcaggaggatgcgaatttctacacgctatcagttgtccaagtgcaggtaaaactggctccagcagcctgagagcagccgacacagagacacaggaccagagtgcgggattgaaaccacacatgaagcctgtgtgcaaaaaaaaaaaaaaaaaaaaaaaaaaaaggtaaagaggggctgggcgcggtggctcacacctgtaatcccagcactttggtaggccgaggcaggtggatcacgaggtcaggagttcgagaccagcctgcacaacatgatgaaaccccatctctactaagaatacaaaaattagctgggcagggtgtcgggtgcctgtagtcctagctgctggggaggctgaggcaggggaattgcttgaacccaggaggcagaggttgcagtgagctgaggtggtgccactgcactccagcctggtcaacagagcaagactctgtcttggaaaataaataaaataaaataaaataaaataagacaaaataaataaaataaaataataaaataaagtaaaataggcaaagagatgaatctacatcaccaaagcactgacagcatctgctacagtgactttggtagtttcttacattctctgagcctcagttttcttatctgttaagtcagaggaaaatgacttatttaaaaaggcttcagtgaggtaacacaagtaaagcacctattgagattagtacacaggaaaagcagttactgaatacaattagtcagttggtaattggtaataattatgtataattcctataattataggaagctctatataattattctatataattcctataattggaattaccaataggctaattgtgtttagtaactactgttattgtcctcaagttgagttattattgcaaaccctgaggcctaaataaacatgcaaaataaactgacttgtggaattttatttataacaatatatgtatgcctaaaagaagtggttcatttgcacaaggaagttttagaagctacagataattttaataatgactacagaaaactatcttgaagatgtttctaatgtttaagacatgatagcataaacctttataaaacggaatactgttctatagttatagttgtaagaatcagtgtttagaggatggctttgatgaaattgtactgctctagttcctgtgcttctaataaaattaaatctgattaatacagcaagtaggtctttggtaagttgattctgatgctgggagtgattttcttaattcttgctcagaaagccatccatgagaattaaatgagatagcatgtacaatacctggtatagttactggtaagaggtttttagtaaaggtcagtctcctctttgtttaccttctcatcaagagaggaagaacaaggaaaattaggttgcttttttgagaaaatgctttatgccaattacaattatctgaaagtagaataaatttctaggttaggcaagactagagttaaaacgtgggtgtgcagagctgacctgccagggtactctatacggaagtacatggaaatgtatgtgcaaatacagtttcatataattgttttgatcatacacagtttccacatcagattatatttgaatgactaattcagcaaatataaaaaaggcagaaaaccagtggacaagatgattcctaaggttcctttcttcctggtctatgccctagtgtattatttgaattgatattcggtggaacacagagttactgctggagattgagttataaaaagattcaaatgggttactccattatatctacttaggaaatctttttttaaaataactgatagatgttcagtttgagaagcaaaaggtatttctggccatccctttatagttgtgtacatgactgcagagccatcatttcatgcttacttccccacattcatgtaccattttctcaaaggaaaatgattgaattaacttgctagttttgattctggggtttgttttaagcaactgatatttaaatccacctagtcctctttagctgttctcctagaaactttaatattaagaaacagctgaacttacacattttgtaaaagagttcagacaatgaattccttcttcttgaaatgcatagaagtacccaggtgctagctatacccaagagccttttctaaatacaaaaaggattgacaaaccaagcattcatcctggctgggtccaacagttaggaatcaaaccatgaacttgctattcctctgtttgtggttaacttgtttgtatatttttgaggaagatgattcaatgcaagaagtagttttatatagtacattaagtaaatttcctataggatatacttaatcagaaaaatatttttggactagagctcacagaacatatgtttacaatagttttcagaaagtgaggggctaaatgaggatttctcaaccttggcactattgagattttaggttagataatttttctatggtgggaggtgtgtcctgtgcattgtagcaaatttatcagcatttgtgacctcatacccactagataccagtagcccccttctcagttgcaacaaccaaaacaactatagacattgcaaagtgtcctctagggatcaaaatggctcctgcttgagaaccacagtctagatctggtagttgcatattgaactgacagtccccagaattgttgtggggatcaaattagataaaactcgtttatgctttttaaaaagtaaaacaaatacatatagttacattatacctcttcttttcatttgttagtcatctaagattttttgagcccgatgatggaacccataaataaattaaccttaagaggctcaaaggtttgccaggtaaacaaagaggttagaagaaaaagagagatcatatcagatgtgccttaatgaatgtctgtatgtaacacgtacaaaaagttatgggaaccccaagaaaggaaaggctctttttgaatgaaatcagagaaaaccaactggaccacacagttgaagctccataataagaattaccaagtaactaattgtaactaaatactctttcatacaatgtcatatatccatgcagtttttaaatctagaagtagttaaggttcatgattatcatttctcagggacactactaaagtggtatcaaatctaaatgagcaaattaagaactgaagttgttacagacagctgttaattccctttttcatacctgctccaatgatagccaacaatcaaacaaaaatagtaaaataaaaacgaaagcaaaaaatccaactcagatttcactaagtacagcaataaatatcagagacattagggaataataataggtcaaagcagaaattcattcctcagtatgttcttcaagtggaaaaattaggtctgttttagttctgttgattctaaaagaaacactcagactatcaagaaaacctgttttaaactctaaatctgacactgtagatagatagatagatagatagatagatagatagatagatagatagatagatagatagacagatagatagatagatagaattctgcctaagtaattatctgctggtaccaaagagattgacgaagagattcactaacctaccagaatttcccaaccttgttccgggttattctacattaaatattcattaacaaggaaattccacataaaagctggtgtgcttgatggagccatatttacatgaaaggttgcagcaatttcttctttaaacctcctctacaatttgaccaattccatgttccagggagtactcagaggttgattaggacatgatttgttagcttagcgtgtgctgtactaatggttatgagtcacatttgttttggaagatcacccttaaagcctgtcactcatgcttgtttatgggaaacgcaacaacttaaacatcagctaacaaatccccatgaatgcatggtcatatttgagtgcttctaacaaatgcttcctttcatttctcccttgacagccctaagaattaaagactagtggagcaaactgggagacatccatgaacatttattaaaggaagcataggagagtgtgataactgcaaagccagctgttgatattaatattattggtgtgagattaaatttcatcagtcttaaaacctactttttaccaccagaaaaatcaatctgccatatttaaggttacattaatgtggaacattccacatactgaactgtcacatgcctttaaaataaccatgccttgctgggtttttttttttttttttttttttaatcattacaagtgaaacaaacagctgacaggtggagatctattggtatattcaagtttttcatgtgaaaatatcccccaacattatttgtaatcccaacttgattatgagaaacaaacataccatatacaggcagaagtatgtatcagtagcctttatatttggcacctcactataaaatccatattatgtttcagtgaacatatttatgtcttatacctgagtttctggttgccttcagctttcctcacttgaaaaaaactatacttaaaaaactataatttaatattaaagttaattaacacagcaaatatttattgaggacctattatctaccgggtactattctcagtgcttgcaatgcctcaatgaacaaaagagataaaaacctctacggtcatgctgctttctttagtgagatatgtgtgtgtttgtggagtggaggacatgcatatgaggcagacaatagactacaaaaataatatattatctagtattttataagacagaaagagctatggaaaactgccccatttgttcctcatctgagtatacccaaaagttgatcttgaatatttcatatgaatctcctaggttctaaatgttagaaactaattaaaaataatttgaaactaaactaaatatctttgtgatctctctggctagaagcctcaggaccagccctcactgtttactgatgaggaagctgaggcccagagaattaaatgatgtagccaagatttcaagcacttactgtcagaggtaggaccaagacatacaaccttcttctctggtgtgcttttctcaattggttaacatttaacagcaagtgctttggttgataaaatttatttgaaaatctgtttgaaacaggacaaaataagaaatacctgcttattccctcactgcagagttgtcatcagcagaaagaagattttgaagtgtatgaattatgttcagacaagacccttataaaatcactctcctctctccagtggcagaagtgtggcccctgactcctcacccatcctcattcatctttcatatttcttgaaaatcaccactgagtattttccttctgcttcctgcagcaccagcagaaaagatgaggatgggtctcttgattgccatcacaaatctctttcttattcttgcttccattcttattctgcacatatcttggacttggccatcattcttagagctccactaaattatttgattaaaagattgtttataagtccagagttagaacggaattgaaaaggcactgcacattatgatggagaggaataaactccagtcaaaagtcatggcttctggactcaccaccctaaggcagcctcactggaacttggttttccaaatgtcagtggggttttagaattttcctacttgcaagcttgttgtgaggattaaacggttgagagagattgtgtctgttatggaattgtgaaaactgtaagttgcagtccacactataaaaatcttagttacctctgtcctttctctaaagacaggttgctagtggaatagacaagtttgccattattttgaaggttgtattacgcacatattatgttagtgaagttggtcgtctaaaagttggaagggacctcagaggtcctatattagaccaactgcggttattccttagaataagctgggagttttctgaaaaatacaaattctgaagcctcatacatagagattctgatgtggaagatctggaattgatggcagcagctgcccatctggagctgctgctgtgaagatgccagctatagtgggggaggtgcggctggggctgtgccctccacagagtgccaggtgggaaacctgcccccttctgagttggcaggtctgaagcccagtgctcttcaggcacggttgcagctgcccatctatggctccagacctgggcatccctgcgctctcgggagcgcaggaagcaccccctgctcctgcaggcttggaagtgcctgctgtcactccctggcctctccctgctcctgcacccagcacccgctctggagtgaagcaaagtcgtggccaagcctggatgctgtcatgacctggacaggtgtgcacacactcggggcagtgctgacacaccagtcccctggcacattagcactctctggactttggacaccagccagcatgggagggagactgagggggcactgaggggtggttcagtgcaggcctgcaggcgttccttggcatgaacagcctgggtgatgtggatgacatgtagatggtggcaggaagcagacaggctcctgggcagaaagaggccagtccccagtgaagctccaccttcaagccagggatggccggaagctgggtggccgagctatcagttccaggtggagtccttggcctagagtgagaacttgtgctttttccaggtctgcccatagccacccatggaccaataagcacacacttcctcccttctgatctcataaaatccctggacttattgagactcaggcagatgtcgggatgacctgcctatggataggagctacccactttaggtctcctgagaactgtactgtcactcagtaaagtacttcttcaccttactcaccttccagttgtctgcgtatctcattcttcctggatgtgggacaagaactcaggacccacttaatagcaggactgaaagaactgtaacacaaacagggctgagacatgccttccctgcccaccacattgtgggtgacaagaagagaagaactgcagccctttggggagcccagacctgtgtgacaccctctttgggggctctgcggtttctggcatctccaagctcccaggcctcatcacattcccctcgtccagatgcagtcgcccacagtggaagccatttgtggtgtatcagatgcagccgcaggcttgcatggagctggtgcctgtgctggtgcctggagctgctccatgcaattgcaccttgataattgctattgccaagcatcgacagccccaccatggcagctggtgtacctggctgtacacagtggccggaccccatgcttacccactcacgcatccctcattgctcctcacctggcttgcccttggcaggcatagggtccaggctggtagcacaaaccaagcatagcctaccaggccattggcagaacaagcccagtgggcccaagaaaaacttggtcaaaggtgctaccagccacagaaaggaaacacaaaggtttctggctggaaaagcaacacctgaagaatcctgcaacagaatgatgctctggagtgttttctgtgttaggtgtgcttgtttgtttgacaaaagctccaaacgtgagtctgaagattagccagtttgggaagccttgcttcagctttctactgacattaaactccttctcctctcccatttctgtcttcacttagaaatggaaacccactaattactcaaaatctcaccttttccattcagtcacctaggcccttgcaccctcattactttgccttccaccttgacaattgctattgccaagcatcgacattaatctattttgacatcttctttccacctgctgccctctagtggaagtgcgacaagcagcaaaatatttaactgggaacagcagggaagtgaccagtttgagctggccagttcacacaagtcagcgcaggtccccagcatgatgtctacagaccatggctatgccagaaatcgttaagatggcctcaagctgtttggacgctatttgcacacaagttacatttagagcagaactttgtaaagaccctggcatttgttcatgggctttttaaaggtttcaaaaatctatctggaaaagattacctttgggatatttttgtttctttgtccctcattttcttcttttgtcatttacccaaattcttcttcttgcaaaagaaggtggtcctttcctgccttccctgacctttgaattgtccaaatcttgcaaaaaataaagatatatatatattttttttaaaaaaaattcttccagtttagaaccttccagtcaccaggtgaaaggtattcacatgaactgaacattgacaatgtaaaggacactgtattctcctagcattcctccaggtctctttgaggtccgttagtagtcttcttttttccaggaggcattgaagttaagagagtttaagaagattgtagtatgtcacaaaacaagtggaaaagctagcactaggtctggctgatggaaaatccttacgtatttttttaatgtgcttgtttggtgtttagcacattttttaatgtgcttgtttggtgtttgattatttagtcttctatgaagtaataaataataacttccatggtaaatgttattaaggctcatggtactatatagcaaaaatcattcagcttttttttaatgaatgtttaataatcagtgtgtctctgcataatctccaattactccttttagcagaggaacatggcagggatgggggtaagtttgggtaggaggaaaagacagcaaaagccacagcactgaagcaaagttgagaccagatttcacaaggcagatgccatatactccctcaagctttgaagaaactaaatagttatctatgctaaccaacagggtaggactcgtactccaaaaactgatgtaaaccgtgtgtgtgtgttgtgtgtgtatgtgtgtgtcttttctgcacaattattaaccctttttgtgtagtggtttttcatagttttatccttgattgttaatatcatggtaagtgatttgttataaatatatttttccttaagtatcataaacaatgtaagatttcatttggctgatttttcttttcttaatattgcatatcattattgttagaatacgcatacagattattcaacttcttaactagaatgtacacacacatgtgcacgtacagaactgccttccatctctttgatggtagaaaatatagctctctatagtaagaaaatttactttgagtctcagacataccctttattctctgcatgactgctcggaaagagtaatacttaggatctggattccagttccctctcctctgaccattttaaaacgttgttaccttggccaggtaaatacacttctatgaacttcaatcgtgcctcaattgagcaggctagtccaaggctagtccttggactagttcagctataggagctgaaccttgatttgtggcatagttgaagcccctgaatagtcagatgaaaatcatattaattaaaattaaatagttattggttggatctggtttttcactggcctgcatgaatgatgttttgccttcctttctgatactcagctcagaggctttcttcaattgggttttctttcttgtagtttctctggttcatgaatagcctatagacaaacactatacggttacaggtaaaaggaccctagactaagtcttttattaaacaaatagtcctgtgtaaataatgacatcttattttatgtgtgtgagttttagttttagggtgtagggcatgtctgacatagctaaaggctgagctccaggcagccagctgctatccaatctccacatctggaatgttccaaaaaacctcctatgttttctttctgcagctaagctctgatgagcaagatttaagaagtgcagccacacacttttggctgcacatttttaaagtttgttattgtcgtcatagattacttgttttgaatcaaaactttttaaagaaaacttaatctcccaaattttaaccctcttgaagtttcaggattcctaggaatacttttattttaagatgcataaaatactcagtacatgtacaaaggtaatgcttataagaaacttggggaaaaaataggggagctagtaagattgagaaggggaagaatatctgagctaacattactaacctggcgactattataggtggctggatagcatggaggcataaagccaaacactgttaagagaatagactggatttgaatcctggctctacctggattcgttttgtgacctcagagaagttgcttcccttctctgtgcctcagtttcttcatatgtaaaaggagataactatagtgtctagcatacagaattattgtgaggattaaataagttaatacatataaagaaagttcaaaactatggcgcacaaatgcttaatatatgtaagatattactgttataaaactaaagaaagagaacccagaagacattcagtttggtgggattcagatatgtgttttcctttcctcctcctcctcctcttctgccatctctaaccccactatgcttgccttccaatctatccctgcctcctatttctcttcctccctgtcgctaaaaatatttagaagaaaagaagaggtgcatacttcacggggtgccaagcttttgggtaaagtacacttttcagctaacatgactgtatccaacagtaatgggctttatggtaagagaaagctttttttccaataagtgggttttagctttttaatggatcattctctttgtatgggtaattcttctggaagatggaaattggctctatgataagatagaagagttggactcaggcatctagattaagggagtatcatgtatgcttttaggagagaagtttaatctgcaaaacctacttgccttatttaattaattgttgctcttagctgctcaattttgtacaggtgacttgcatgaaagcaaaatatatgtcaaaatccaaaagcagagtgaagccttgggacttcagtgctttcgggtgtctttccagacctctgctcttcccccaccctcaccaaggccccactgacctcaaagggcccttcttgccaggccatgaattacatctgagccagagggctgggactacagccaaagccaaatgaaggtgcagaattgaggactaaaaaaagcctgagcacgtggtactgggtatagcagataaatttgttggagaaatggtttataaataacatgaaaaggggaaggggacagagggtcacaatattgagttgttgagagttgttcgatatttgaggtcagtctcaccatttttagtaacccaaaagtaatactgaagaaaaaaagctccctgaataaaattaaccacagctgggcttattttttcttatcaagacatttgtaagtttggcagcaagcatttttaaacaggatctcttttatatgaaataaatttaaaaacatgtgtctgcagtcaggacaaacaagtgaacaaaagcaaagcaaaagcgaaaaagaagccccatgaaggcattatgcttttctgagtacagtataaggctaggatactgcagaaactgaaatacttagggatcttattgaaatagttttcttttcctccaaacaaagcaaccatctcagagggatagatgggctaaaagacaaggaataaagtaaacagaagattgataacttgggaggttttcttttcccctttctctatttggttttgatttgcttttccctcattaaaaccagaaaggataaattttggtccagaactcccaagaccagaggtcagggaaagccagcctgaggctggaagctatgaacttatcgctagtctaaactccacctccttcttccctgggagtcctgcacaaatataactgcctgatctttctgtttagtggcaaaggttttgctcccttctctttcatatgggaatattaatttgggaaagatttgcctttttttttttttttttaaagaaacagagacttgacttattcctcccacaaactctttccctggcacagggagaccacaaactaagtgaaaaacaacgtaagaagcttagacaaataggaccatatgccctcccctggagctgaaacatgcatgctccctgtccaccatcacctcgtcttcctatgcttctaccccacccctgtctcttccacactctgggtcacatgtctaccccttactgtgacttataatcacccaggaagggtaacacattgactgagggccaagcttctgataagtgaatgaacatgtcttttctccttgccagatatctatctttgccagagagggctgagtcagggagactaaggttttcaatgtcaaattgtgtattgtttaaaattgtgataatttgctttctgcactgaatctcattttcaaaataaaattatgccttaagtcagatcatactgatgcagattctgcaagtgttaagaggcttctgtgattgcatttgccagctgcaggtcaggcagtggtggatagtggtaagaagtaacctatacttttggctgggagctgtgactcacacctgtaatcccagcgctttaggaggctgaggcgggcagatcacgagatcaggagattgagaccatcctggctaacacaatgaaaccctgtctctactaaaaatacaaacaaattagccaggcttggtggcacatgcctatagtcccagctactcgggaggctgaagcaggagaatcgcttgaacctgggaggcggaggttgcagagccgagatcgcgccactgcaccccacactccaggctgggtaacaaagcaaaactccatctcaaaaaaaaaaaaaaaaaaaaaaaaaatgtaacctatacttttgcagtagaattttgaaagttcaaattcaaactcaggctttgtattttttccaaagtaaattgtattttgttcattttaatccattggttgaatctaatgagatctctctgactggaaattctgccctttttttcctccataactgacttaccagttatctctcatccatgtattttgataaatccataagaatgtctgtttttgttgtctaccaaagcctttataacaaaaccaaattcatagctttgtcaactgcacttgaaaattatgccccaggcttttcaagattctgtaattaacttcttgagtcatttgtttaaccattggtgaattcatttatctttactcgggccacagtaatgtattttacttacaacatattatgagaaactacatcacctgcttcactgaaattgaaaaacgttagatgaacaacactgccctaaaccacatttcaataatcctttgatgaaaagaaagtgagtacatttcctataatgatttgttcttagtgaagccatgttggcttcaagtgacctgttgtttcctttcagggcttacggaaataatctaaccattctaaaatattgatggggatttgggtcaaaggtatagttttaaaaattcaccatctttaacctgttaaatatccaaagaaataatcatttattatttcatttatgctttcagtatctaggacataattaatctaatattgaacatttgaacttattgttagctttgaaaatatgccctattcctattggctttatactcaagttttcttaatacattccctcaatcgtctccagtcttgttattgcccttgcccaagaagaagaaaattctgtaagagctttcttttgccttcctttcttctctgagtggaataatcttttttgttgtttttatagtattttagagtttcgcgagatcagacaaaaattacctcagcttatagctttatcttttaagtggaagaactctgaactattattgtgtcgtcttgaaaaaatagtctatggaatatatataggtagttgtgttattttttgcagtgttaagttcacctttttcttctttttcttttagtgcattgtgaacatttaaaaggtcatttgtgcagcatataagaggattgacaggtttccatgcatgatgcttaatgtggaggtgatttctttccatcaagttattaggtttggaataagtaacacatcttaaaattacaatcttgatgtagcaaatcatcaggtgggttaccattacatggaaagacccagtaaaataaagaccattaagttccggaccctaggagtctacagtaagtcattgggaagttggagaggagaaaggcaacgttagctaggcatttcattcattcctccataaatgcttactgggagcacgttgtgtccctggcatcatcctagcttcactgaaaagaatgacagatatataaaatgagtaagtgagaagtaattgctctttactctcaattatagctgggcaagtgcatctataaatatgcttttgtgttctgaacacacactaagcagttggtcaaagtagtaagctagagaaaactactttcaaatgtagtctttcaaaataaaaaaataataataataataaagatttcaggacagtttacctatgaccatttagagatttaaggattaaaatcaggagagaaggggaatgtttctgctggggaaagatttttaaactggtgttttctactcagctactcaaagtgattttttaaaattttcttccttctattacttattggcctttattgtggggaagactgctctgttggcaacatgagagagatgtgaatcaagaaaatggaaacaccattcaatattcaaaagccactatccccctaaaagcaaccacatactcagattgcacactaactggaggatgttaaaaagtgttctgttaaaaccagttatccagtttttgctacttaaactctgctgtgagaaatgtgactatagagcagccttaaaaagagatcatcttgatattaagcagtgttactcatacatgcttattgacattctaacaggtgactttgaatggatcttcaggctcagaaacatggttgtgtgcctagaactggtgactggaacaaggtgtacagaagtgaaatgaccacttgctttctctattggatttctttatccagctgtgcatgtgtttcagggactacagttgattttcttgatgcaagcctagcaacttgtttttccgttcaacacagtaaaatctgagcaggagagaactccctgttggccacccacctcacaatctttaaaagggaactctgtacagaagcattccacattaggcaaatgtacacttctgcaatcaaaatgaaaaacacttgagctgaatcgttttccgttagctttcgtttccagccctgattaaaaagaatgcagggaaccctgcaagtttaagcagttttggcaggcgaggaaacagctgtgacattgtcaagggttgtctgtaggagctgtgcaggctgctgacagtactgataatgcccagaaatggggcagacgcttttcacatttggtcatcaaaggggtggcagcagctaggttcaaaaagtgaacttttgaccctgtctgagacaactggctctcatgaatcttgttctgtcattctccagtctgattttctctttcagagcaagcgggtaggatctttggttttaagactgattgactgttattaaaagtagctagttcttatagctgcaattggaaaggatggaaggtgaggaagaagagctggtatttcccactatcctgcaggagtggggaaatctatcaatgactgttccactaatctgtggatgagctatctagggagttatcatgcagttgccaaagttttcagcatctaaaagcctccaaagttctctctgtgaggttccacctcccctctctccagacccttcccatgcccctcagattcagcacttgtccactgtccttgctaccagggaatccctctgcagccccctcaccctcctgcccctcccaaaagagttccagactttgacctgtcccttccacctcaacatctgtttgtgtcctaaactgatggccattgaaagaaacagataaactaattaatgctgaggtatgactaattaagtattatcaatgtgctaactctctcagggttatgtgcattttaatagaggaccagcagtccaaaggccggtctcactccactgtgcccctctatcagcacggagtctattgccaggcagccagtgaccaagcctgagaacttgccccagatcagcagcctccccactgagaaagcaagcaaactcaacagtttttcagtgtttcagggaggctgcagcagcaatccagttccttcaaagggtctgtggattctctcagctttcctagtatgttgctgtggtagttagttcttggagcagaagttcacaatgtgaatcttcacatgctgctctgtgtgccgagcgggtgttgtaagttaattctgcccctatctgccatcttaatcctaacaccccccatgtttgtttaatttaacttttattttagtttcagaggtacatgtgcaggtctgttatacagataaattggatgtcatgggagtttggggcatacatgatttcatcacccaggtaataaacatggtttccaataggttagtttttatgtcatcacctgcctcccatcctccatccccaagtgggtgccagtgtctattattcccttatttgtgtttatgtatactcagtgtttagctcccacttataaatgtttagtgttctgttcctgtgttagtttgcttaggataatgacttccagcaccatccatgtggctgcacaggatatgatctcattttttatggctgcatagtattccataatgtatatgtatcacattttctttatccagtctactgtcgttgggcatttaggtttgtcccatgtctttgtctttgtggatagagctgcagtgaacatacatgcgtgtgtgtctttctggtagagcaatttatattccttggattgtcgggtaaaatagcagttccgttttaaattatttgagaaatcgtcatcctgctttccatagtggctgaactaatttacatacctactagcaatataaacattcccttttctccacaaccttgccagcatctgttattttttttttagtttttagtaatagccattctgactggtgtgagatggtattcattgtggttttgatttgcatttctctagtgaatagtgatattgagtattttttcatatgcttattgtccatgtatatgaattcttttgaaaagtgtctgttcaggaacatcattcctatgaaaatgctagttaattatgcaagtattacttgtttccattaattgagttttttaaaaaccttataatcaatattgcactaaaattttcagctgtgtgattccttatcactttcttggatgcaaatgccttgtatcaggtactatatctcataaatccacattgcatctaacaatgtagacaattaataaatgcttgtttaacaagcggatttgtttttgctttattttgctttctgtgttttccttaggatgtggggcattaggccaatggaaactgtctcttaaaagttcttacatataaatattgatgtcaaagtaactatttttgtacaaataaacacatttacctaatttggtgagcatttatagagccctgcctatattcaagggcgctgtgctgatcactgggcaactgaggaagtatgaggcactgttaccgctgtcttccttcccaaattgggtcctagaccgtatcttggtagagctacctcctaaggaagcccacctgtgctattgagggtacatctgaaggcagtgcactggaatgtatagcctaggactggaatttggagtgaggccctgagagatcatacacatttttcacttgtgggggaatgtccttaactagaaatagatggtgatttcagatatttgatccaaacctaacttcctcatttgaatggagtaaactaataactgttcttgaggctctggaatagtgatgaattttcctggttgggaattcagatgctgatttctgaagcagagttttaaagttgaaagatgaaaagggaacagaacaataaactcaagcttagaatgaagggtcatttttctagtccaacttccctccacctagctgccacccaagattgtcccttagccatccttagaatattaaaataaatccattgcagtgcccaaatgacttttttctatttgaaaatccttgccattggagaatttttctatatatcttaaatggttcttcatgaattttgtcaagtttgtcagcaatgtgctcatgacagtatctcatatctatgtgtattctaccactttagcctcctagacttctagaccagcagttcccaaactttcaaatatgaccccttttaatgtcaacttctgtttataaaagtacaaaagccctcacatcttatactttttttatgcttttatttattgagatattagacaacacacacttgtaggtgacatggattcttagatctaaataactccactctccatggtcattctcacttcaacacaggttgatgcagtccttagtttggaaaacagttttgacgtaaataatcccagactttcctgtcactttttggagcttttttcttcatgctttctttgcatctttcttaaaatgtgaagactacattggatatattattaaaataacatcattactagtgctatgtttaaagctgactttttcttcctagccactgatatagcagtgccaactgtggactttctatagaatgaacactttagaacacaaacactgtcacttgtaaaacccttctttttatcagaacagcagttagactttgtgtgtgtgtgtgtgtcttgtgcgtcctttatatattctacaaattattaaagacaccaaagaccttttgtttatgtgaggttttgttattgatacttactgtcttagtaattaaatgtaagaaaatttttaaacgacacatctcattagctgtcagagcatcatcatgtcttgtaggctctggaaaactccatggtacgctcatgaagaatgagtgtgaaagagacaaatagtagcttaatgttattataataatagttggactttgtgaactcaccaatataatacatattcatgacacagtccctaacatctaaaaacttacaatctaaggcccaacataaatactaatagatgatgttaaattctagcttcacagtgcttcctacaataatactaaaaatatgtgaatttagacagaggccaaaatgtgtttaataaccacttggctttgcttagtattttattacccaccttggagaattggccctcctgttttgcactttatgagaagcagccctatgaaatgttttatcagaagtttaacaatgatgtagaacacactgtttcattttataatgatccttgggcaaaatggtataatatctgtaggagaaatgctaaatgctgcagtaaaaactcctcagaatcacgtatgtttttatcgtgtggtcactataaatcatgtaactgtgctttctgatctcctttggccaccaggaagacaagaactgacaatccatttattgtaaattcttcagggtctgatgtcattatttctatgtaagattttccctggcattatcttatttctcaggtctcatttttcctttgttctgatttatttttcttaatatgttttattgtgcatttgttaatatattttgttgtgtatttaatttccaatggggatgaatgaataagtgggaaacagagatacttgatccaattgacagggactgcttgagtatctggagtggtgcagatcaagcagggtaattgtatcaggtttcattaatgaaatgggtcttaaggggagattaggaaggaaaggaagtgggttgctggagaggcggggtgttttatgtggcagatcggctgtaatcaacatgcagctgtggagtgagtgagtgatgtcctgagcacagtaaggagatctggctgacgtggcatggcacctcattgccttaatatcttttcatttgattgaagaggcagctgagggataggtgctcttgaaaagtggagtaaccatttgtaattaaggaggactctcacttcagtttctaaaataaattagaagggagaaaatataaagtctgagagatcaattaggagaaagttctggtgctatatatagaaataggcctatctgcatatgcaggtgagagtatgaagaagaatctgtgaatggcagtcattttttgtagctggttccaattaaaattgattctttactatcgcaagaacagaaaaccaaacaccgcatgttctcactcataggtgggaactgaacaatgagatcacttggactcgggaaggggaacatcacacaccggggcctatcacggggaggggggaggggggagggattgcattgggagttatacctgatgtaaatgacgagatgacgggtgctgacgagttgatgggtgcagcacagcaacatggcacaagtatacatatgtaacaaacctgcacattatgcacatgtaccctagaacttaaagtataataataaaagaaaaaaaagttggaaaaaataaaaaaataaaaaataaataaaactgattctttataacgactacttattggctgctgctcaccaggtctgcttttctcatcattgtgtgcagaacataccacagtatacactacagagtaggtgcttcataatgtgttgaatggatgaaatgggttcctgcctccaaaggagatggaaaaaaaaaaaaacagacaggcaagtaaatgaagtgaaatatgtataaactgctttgagaatgttttataaaaaaggacagcagccaaacagcattcacagtaggctggctggagtagcagtccttgaagaaacccatggaaacagcggtagaagcaaatgtgcaatagctctgccttttcacactatagggcagcacataaatagtcctggagcaccagggtccttgtggattttttaagttacctagttggcacagcattggctcctcctctcgtgtgattaggggccaggatacaataaaaatatgttatgttggaactttgatgccagccttaacttgccagttcagcgtttgtggttgcaggtagtatcagctcctctcctggtatgattgagagactgaagtccaaggcttcaggttgaacagaattgattgccttaaggaccggtttagaactcttccatagcacttgacaggaagccagtttatttttcttggatgccagcttccaagaaaagatcagtcttgagcaaaatagttcttcactctcagctcagaagcctaattgagagggtgtcctctaagcatcacagccgactctgctagtaacctgttctacttcaacctgtaaggcccatgaggctggccagtgacatcactacaggacacagtggaggatgtttaggaatgactaggtgatgaccagggtgcagactgtgtttactcaaggctaattgagaggtactattttcagtggtgtgcttataaatgtgtaacagtactgggttgaagggaggctctgacttgtagcattttgctagtgtccatggtgtaaatacccccaacatgactaactttaagttaccaatgtgattgaaagtagagtttggaagagaggcacagtagcccactgttatgtagtacttttgccatacagatgcataagagacataagtaacctgaagaacatagataattattaaatgtagtgaaatgattatgaagtgacagattttaagtgttttatcacatttgtttttaatatcatttaattttaagttgccataatttaatttgtaattaaggctatgttaataattggcttatggaatttctgagaattcaaaaaccagtgcctataggtggatccagtacaccactaggtaagaacagcctagaagtacttctaggctcttgttctgaaagatgccaagactggcatccatggttccagtgccagcgcaaggaaagacttactaggtcctacagtattgctcccaaatctctttcagtggccagggaaattatcggactgaaggcagagtgaattttgctgaatggcttgcttatattcaggtcctagtatctatgattgataatcagcttcatttgtaagtattggatggtgcaactccatgcatccaggaggctgggaggtactgagagcagagtgatagtgtcaaaagacactaaaatgaatgccagctctctcctgccatatccactactaagtgagaaattcagtgacatagtcactgaggactccaccactgctgggtgttggggagggcacactgaacatttcaagacaatctgggtaagatttttcttggagggattcaagtacgaaatagttaatatgcagaaatgaaggggaaattattataccccagaaatgagtcagataatactaaagaaaggaagaaaggaaagcatgacttgaattctgtctttaatgatgaccacagaagaagttgggtctttaaagatgacaagagaagactgatcaggtagcagtgaggtgggaggggaaagatgagagaggggacattcctagtagaggaagtaaggtagacaaagtgtaggaatgtgaaagagcataatgtgtgtaaatattgttcaggtgacttcttgggtacctaggtactagataaagaggaattagaaataagaatggaagaaggggagattcagggccaggttgttgagggcattttatgccatgctaaggagttttgaatttttcctttcagtaatagcaagaaacttaaaatgagcaggagttcgtgtttttgaaagaactaggaaaacacctctgggcactccattacctgggaataatgggtgaaatttcccaagttagtgcacaggctgctgggtagggcttgaggctttcctcttgcctcctatttcaacactgtggtcttttagggcttgtcctcaacatgttcttaaaaggaatgtttgctcactgccaaaacagtagtcttcatatttgttctgttcctttccaaaaggtaaattgaaaaagcaacataccctcagccaaaagaattaatcttttatcacctaagttactgcccactgccttttagttttaaacttaatttagtgtgcataaatggctataagcccttggaactctctttatgtttgcatcttaaatttaccagaccctccttctatctatagttccagaattttctttgtcttattttcttcaagaaatgtatttctttaaattggattgcaaatttggaatacacacagccaaaggctttcaaaatcattcttgttaaaagggacaagttacttgagaacgtttttaaaggaaaaagttaaaatagatgtcaatggaagatgcaaatacgaatataaaatatgaaaagcatctataggctggagcttctcaggagagctctacttcatttaaagtcatattatctggcaccatttcaaagctgtgggttacttgattttgtagttagaaaaaaagtataaagttgaaatattgagctctttacatgacctttttgctaggagcagtggatgaaactatcctctaagagatcaatagctttagtgtaaacttggtcaataccttattggaagaagtaactatgtcagattaggtagaaattttagaagccagcaagtttccaaatgtccttctggaattggcctcttagggccatgtggaccagagggatcttatcacagcagtaataaactaatatctattagccaaatctagctcatggacacgttgtttggcctataccacattttttttttttttttttaaagacagagtctcactctgtcacccaggctggagtgcagtggcgcgatctcggctcactgccaggttcaagcaattccctgcctcagcctcctgagtagctggaattacaggcacccaccaccatgcctggctaacttttgtacttttagtagagatggggtttcaccatcttggccaggctggtcttgaactcctgacctcgtgattcacccaccccctccttggcctcccaaagtcctaggattacaggcatgagccaccacgcctggctcacaccacatttgtatgaagttgaattggttatttttaaaaatttgaagaatttaacaacaacaacaacaaacttttgtgtccagcatttttttttttttttaactattgggacaatcctgggcctgcattctttgaacagttggctacacttaagtagctgctgccccttttagatggggcaagcgttctctactttttcacagtccctttcaagggtgcttcagccatttttgatactcacttggcttcaataaaccaaggtcatgtttaaaagattaaataacagttattacacacgcaccaaaccgtcagagggaaccagacttgtgtaccagaacagagtcctggagcatatctctgttaggctagacatcactcttttagttatgggatcacggaaaggtgcagaaagttcctgggaaggggttgggagggattctggaggatcccaagtgtgactcacacacttggaggcttgagtcaatagctttttaccagctagcatgaaagtacttctagtgtttaaaaacctatggcacagtgggatcttctaggaaagtagaccctggagatggagattcgaatatagcacatttattaaggggtgccactagtatcgatatctgtagaagagagagaaaggatgtgagagtgggcagagggagaagttgagctgcaaagcaggcccagtgccagcctcaactggctccatgaggagctctggagctggaatgcccgtttatatttgtttcccatgggatcaagatggccaggccattctactctgacatgcatcactcattgaaagtggaaagactcttgctcttgaatgaggcaatcctctgccactgaggcaatccctcaaaggagtaagaagtgaaagctgttggcctggagcacctgcagcatctgaaacaagaaatccttcattgaacaggatctgggcagcacaccagagtaatcacagtcagcagctgtaccagtgacaacagatgaatatcaactctgcctttagcccctagggtgtgacacctggcctatagcttatccaaagctgtgcctaaactctttggactgattcagaatcaagctagtcctagcctaaagagaggagtttaatgtcatgctacactctaacccaatatttgctggcttgtaattcagtcattaaagaaattctttttattttcacatagttttagattgtcaaactgttaccattctgtgttcagaaattgaaacctattctttctattctttttttttttttttttttttttttttttttgagacggagttttgctctcttgttgcccaggctggagtgcaatggcgcaatcttggctcactgcaacctccgcctcccgggttcaagcgattctcttgtctcagcctcctgagtagctgggattacaggtgcatgccaccatgcccagctaatttttgtgtttttagtagagatggggtttcatcatattggtcaggctggtcttgaattcccaacttcaggtgacctgcccccctcggcctcccaaagtgctgggattacaagtgaaatctattcttatattttactgtaacctcagaaaagaatgcttttttgaggactagaattctgtctcttttgttgtcgtctcctttctctttcccaaacctgtaattctattgtgcttaccacacaatgaacaatcagatgtcttaaactgcggcttacataattaccagtataacctttttgcttttatttttttctttcattttaatctgttcatgaggactgttacccaggtattttaaaaatctcactccattgttttaaggttagtggttccaaagggattttagagaccctgacccaataatagttatatttttctaagtgattctgaagcaatggtcccaggtaagaaattgcagttcaaagcacatcataggtttgttattttccaaattcttattaaagcattaatgcaaatggaattttcctactactcctctgctttctctaatctttgacaggattaattgctacactataatatgatttgttataattttatgtttatattaaagatatagaatatgattgccctttgatgtcaaatactaaagattctgctactgttttagttgtgctggttcttatcttccttatctttcattcaccttttcaattcatctcataaacatttaatgaaaacttattgtatatcaagggttgtttattataggaattgtaattcaaaaactttctttctctggtctgaaaattttagaaacataaaaggaaaaagggagggaggccaactgagagtataaaaataaatatggcatttattaacaattaaccagtttcttttttctataataatttatccagtaaattgtatttttaaattattgttttagtttttgttgcatatgtttaaggaatacaacatcatgttttttataattactagagtcaagcaaattaacaaattcatctcctacatagttatcttttgtgtgtatgtgtgtggtaagagttccagaaatctactctattaacaaatttccagtatggaacacaatattattaatgatagtcctcatgctgtacgttagatccctagacttattcatccttcataactgctactttgtaccatttgaactacattttcacatcccctgtgaaaatgggagggggacggtacaattcgcatggaatatctttttccatcacttaccttttagtgtatgtatgtactcagatctaaactgagtttcttgtggaaaccatacagttggatcttcgttctttacccattcggccgttctgtatctttttattgagggctttagaccatttacaatttaagtaattattggtggggacagatttttttattattattattatactttaagttctagggtacatgtgcataatgtgcaggtttgttacatatgtatacgtgtgccatgttggtgtgctgcacccaacttgtcagcacccatcaactcgtcatttacatcaggtataactcccagtgcaatcccttccccctccccgctccccataataggtcccagtgtgtgatgttccccttcccgagtccaagtgatctcattgttcagttcccacctatgagtgagaatatgcggtgtttggttttctgttcttgcaatagtttgctgagaaggatggtttccagctgcatccatgtccctacaaaggacacaaactcatccttttttatggctgcatagtattccatggtgtatatgtgccacattttcttaatccagtctgtcactgatggacaattgggttgattccaagtctttgctattgtgaatagtgccgcaatgatttaatcttgccattttgtcaaccgttttctatttgtttatgattcttttttctcttgctgtcttcttcagtgttttgttggtttttttatattgataggttttgatttcttcttttgtgtaacttctatatattttttctttgttatcaccaaggggcttacataaaatattttagagttgtaactgtccgatttatgctgatagcaacttagcttcctttgcttataagaactctctgcttttacctcttctcccccattatatgctattaatatcccaatttacatctgtttatattatgtatctagtaacataatttagttatagttgttttaatacttgtgtcttttaatttgcatagtagaatgaacatagttacctaccactgttatagtaatacagtattctgtatttttttttttttaccatgttccctactctactgctttctttttgtttcaatttgaagagctatctttggcatttcttataaggcaaatctagataaactctctcggctttgtttgtctgagaaattctttatcttgcctttatttttgaaggacaggattactgggtatagcagtctttgttgttaggtttggtgttttttttcttttttcagcacttggaatatatcatccaacttccttcagacttgcaaggtttctgcagaaaaattgtctgataatactacagaaattttattataagtagcaagtcacttttctcttgctctgctttcgaaattctctttgtcttcaacttttaacaattataatgtgtcctggtgcaggtctctttggattcatcttgtttggtgtcctttgggcttcctggatctggatgtttattttcttctcaggactgggaaattttcagccattatttctttgaatgtttttttctctctcttcttcttttatatattccataatatgtatatgagttcacttgatggtatcccataattcccttaggctatctttacttcttttcattcttttttctttttgcttctctgactggataatcatcaacaatctgtttttgagttagccaatcttttcttctgtttgatgtagtcttctcttgaataccttctgaataaaaacaaacaaactctttttcctctgctctcacagttcaacaacaatcagtaaggaagccttttgtgacaaaatgtgtgtttggggaaggggtaatttccttcatacaacaagtaagcaatcagttctgcagtaaataccaatttggtgtcctctaattcaattccaacacttctactgagagatctgcagactgggagctcagtccctgagactgtcttcctcaaccaacttccaatgccaattgcaaaccccaggttattttgcctgtacttcttactgactggctataaactggggttcccacaacccccttctcaggttcaattaattttttagagtggctcatggaacttggaattacaaagaatattttaagggatacaaataaacagccagaagaagagatgcctagggtaaggtcaggaagggtcatgagtacgggagcttctgtccttgtggagttggggtgcacaacccttcggacatgtagatgagttcttgttcaccttcctgtaagccttcacatgtatagctatctagaagctctctaaatcctgtactctttgaccacttatggagacttcactggaaaggcatgattgacaatcatgtggaaatgtgattggacaaaaaaggtattagctagtgctaacagactgaatggaaaacccagaaaggcctgtctgttcagattcttcctggtctctctctctgcagcattctttcctccagtgaatggggcaggaccttttttgaaatgaaaatcttatgacctgcaatcagacaaagtaggtcagagaatttctttatggccagaggcagggaaagacttaagtgtatttttagtttctgttgcctgccttctggagaaaaaggaacaggtgaatagagggtaagagaaagtcagacagagagattctgtttttgaggcctgcttctaagtgtctaaagcaccccagcattataataaaagactgtaataagagctaaggaagttatgagccaggaaatgtgggcaaaataatatcacagccctctattattttttatttatttattgtattatttatttatataatttctgtttggtactttttaatattttctttttgatgaaatctcacacagaccatgcattgctctcataaactcagtgagcatctttatggctgttatttttaattctcggtgaaatcggttacctccatttcattagggtcagtttatagagatttatctagttcttttgtttgaaacatattttcctatttctttattttccttgactacctagtgttttctttagattatataaaataagcatccctcccaatcttgtcagattggctttgtgtagcagaggtacctcaccaatcaacttgaccagagatttagggtgcctctttttatttttttgagacagtttcgctcttgttgtccaggctagagtgcactaacgccatttcagcttaccgcaacctctgcctcccgggttcaagcgatttccctgtcccctgtctcagcctcccaagtagctgggattacagccatgcaccaacatgcccagctaattttgtactttttttggtagagttggggtttctccatgttggtcaggctggtgtcgaactcccaacctcaggtgatccatccacctcaacctcccaaagtgctgggattacagatgtgagctacagtgcccggcctggggtgcctcttaaacttttgtgcttattcaaaccaccagttttgttcttagtggccctagataggaaggtcccaagtcctaagttagtgcccaaggtagaaacctgtcgtccctcaagaagcagctggaaatgttgaggctctagatgagtggtccatcttcctctctcctcagggataagctgggatctggactttatgccgcactcaccctgcagtaagccagagagaggatcggtgcaaaatgcttgtgctctgtttcagacaatgcagtctctaaacatttactttgctctctcatccccaggagacttgcaaatggcaagtctccttagctgtcctggataagaaaattagctggaagcttggttatgtttctggagtgaggagctgcaggaagtgccctcatgcctgttcagactcccggaggtctactaattgcctgctccatcagctccctgatgcaggctaattaatagcttaatccacggactgcagctaggaaagtcagaatattatgtacgtagtctaactccatccagggagaaactgagagctaggtgtttttgcttgatcactctgcactgagtttggggaactagctgctggtagtgcacttgagctcatttaaaaccacttctttgttccttgcagtcttgggggactcataaatgctagatccccttagctcccagagctaggtgatttaagagccagtctctcaggtgggagctgtaaaagatggggtgctcaatgtatggacaaactccttccagggacaggagagattagatgctttatttcatcattggattgagctgggggagaaggcacaggaaatgcccacacactagtgcccacataccctttcaggctcccagaggtcttactaattacctgccccactggctcttagcccacttagtaatgctataaggaatacctattgctgggtaatttaagaggaagagaggtttatttggttcgtggttctgcaggctgtacaggaggcatgatgctagcatctccttccagtgagggcttcaggctgcttccactcatggtggaaggttaaggggagctggcatgtagaaatcacatggcaagagacgaggcaagaaagaaagaaagagaagaaggtgccaggctcttttcaacaatcagttctctcatagaaactaagactgagaacttacccactgccctgacaagggcaccaagccataaatgagggatcattcttatgacccagacacctcccacaaagtccacctcccacactggggatcaaatttcaacatgaggctttctggggccaaacaaaccacatcaaaacccgtctcccagttttagactatgtagagttttaatccttgggcagcagctgggaaagtttgcaataaaacccctaccagagagaaactgagcctgagggaattggagtaggaagttcctgcacacctgtttaaaattgtctccttgttctctgtggcccagagatatttgcaaatgctgagcctatctgctcccagagctaggtgaattggtgatatggtttggctctgtgtccccacacaaatctcatctcaaattgtaatccccatgtgttgaaggagggacttggtgggaggagattgatcacggggacagtttcttccatgctgttctcatgatagtgagtgagctctcacaagagctggttttaaaggtgtttggcagttccctctttgcttactttccctctctcctgccaccatgtaagatgtgccttgcttccccttcaccttccaccatgattataagtttcctgaggcctccctagccatgtggaactgtgagtcaattaagcctctttcctttataagttacccagtctcaggtagtttctttctagcaatgtgaaaacagaataagataaggagcaagtccctcagggaggagctgtaaaagctgaggtgctgtatgtgtagttccaaccctttaatttctaagaaggtaaagctaggagttgggtttccttcctgattacaaagtgatgtgcctggggtggggcttttggtatgaattaaccaatttcttaagcatcaacttggtgttccaaactgtgctaagggctagggaagaggctttgttatccttatttggagagagcttatagtctaattaggaataagaaaattgacacaaaataacagcaaataacaaggcaacagaatcagttgctacatgttatggtggtatataaataaatgatggtagaatttagaaaactgaaaggggacagggtagacaagagtagtcaggaaggctgcatggaagagaaggaacttgatttgggtatagaagaaggggctgggatttgggaagacaaaaagcaagaagagggccattccagtatccaagtaatgacagatagagggacagggcgtgtatgtattaacatgagaatagcagaagtttgatgttggttagaacttactaccaacttcttacagaactttcccttaaaaattctgagtttgaaaacattcaacacctcaatctactttcaagatttcctggcaaagtgaaggaagcaaatacctttattattttacaactgaagttacctgctttgtcagttatgatctaggctgattctaactacctactggcaacctagaacagtcaaaagacctaggaattcattcaaaagaccaaaatctgcattgtctggcagtgtgagcatgagcaaatcacttcatctccttgagccccagttttctcatctaggaatgaaaagtagagccttatctatctgaccaggttattatgctattaagttatatgagtaaatgggaaaattcttcttaaacaataatacaaattttagttggtacttttgttaacatctacactagaccacatttatataggtaatttaaaagtaaaaaagaatggggaattcatttttatgtcatggatttagattttttcatagtagaaagttaatcattcagcagtgttttttacatttcaagtagcaaccatcatattgccatgaaatttatttagtagcccctaactatttttttttaatgaaatagcataggatgaaagtatagtgtatattgtactttttagggcagtagattatatcattcatcatagagataagtgtcgtttagtgacacacaaaggcataagtgacatacacattggtcaaaatgtaaaatatatttctttttgtagattgttgtcaaagaagattgaaagacattaattaacggtatagtatttcaaatataaaatcctcagtcttcatattttgaaccttaaattatactaaccaaaaagataaatttcagagaaaagttattttatgtaaagaaagtgaaattttgatgaaatgagacatgctaccacatattctttattttattcttatgtttcttgctgaaacccaaattctgtcttcacttctgctacccaagtatagaaagcaaagggtttgctttttgcatttccatcaaaatctacatgcctagaaactcaatgtgctctattttttctggtagttcttgagttgtttattttaactatcaataaatattatgtaatttaaaaataaaacttaatttgtgacaaagtcagttttcagtctgggttcacagaagaaagggatggcatatgcaaaaaggatgtaaccaggaagagtgcaataatatgtctatatacaagagggttgatggagttaaggaaaccaaccaaggatggtgaagaacccagagctaggaagagggtactagctcccaggcgtgaaagggcacagtgttctaggttccagatgtgacactgatcagtgggagaggagcagtatgactagtgccatcaggggaaaccacagtcttttcaggaaagagggagaggcctggaggggacaggtgcctgtggctgaacccagtgaagaccaagggttctgggcaatgtcatctgtaatggccaacttcctggggcacagagcagggaagaggagagtggaaaatgaatgtggggcaacaaatggggagtaaccagcaacctatcatatgaatgatcatttttcatgtcagatggtggcatatagcttttctattcaaattcagtttccttcctctgttttctaactgttgaagtgttgtcttttacttcatgcagtctacagaatatcctgtgctgtgctgaaagaagacaattgggagagaaaacattagtgaacttgttgtgtaacttgtcaaatgatttagcaaacacttagttaaggaaatagctatacttatagattattttttaatctccatttacatgatcacgatatacctgcttttgcagtttgactttgacaagaagcaaactctgagatggagtttagtggcaggacgtttattaaggatcaacgcctgtggagaggagcccccagctgaccccacaaggagctctggagctaggatattccttcacgttgctacccacccccgactcccaccttggttgatacagtcaggcctttgtattccacatcactctgtcattggatctcagatgtaagctagggaatgtgaccttggctaaaagaggcaatccttgaaggggctgagatcttaaggcatcagacacttccttccttgaagggggttggggcagagcctcacagaatccatcatacctcccttcattcaacatacttctaaaaaaatatattgtgagataaaaatggtttccaagttttgaaagttctgcctctttgcaggaagaagggacaccaattcttgttgagaatctagataccctataaagagtaaccctcccaaagaaataaaatattgcatttttattgagacatctatgatccttggaggtaaggttttgtggatttgttttttgtttgcttggagcgctccctgtcaagcattgatctctttacgttcctaagtatgcctagaactgaaatgaggaattatcttaaatatagctattcatgaagtatcccagtcagtgtctttgaataaaaatggcccactaaaagcttcctattatttctgatgcctcatattggcagattctgaaacaggtgactaaaaaggtaaaaagaaaatcaaattattggggactcagtcttgagtttaagcataatgaggacccacttggcattaacttttagtcatattccccatcaagaaattgttctccagaaatctttataaattagatagttaagtttctaaaagatgactgtgaatctaggactgatctaccaatgacgagaactgaagaagcacttgcttaaaaaagggaagaggtatttacatggtacagaaaaaaactgataagtaaatagtcggaaaaaaaaaaaaaaagccaggggtattccaaggaaagcctaagaagaaaaaaattcaaaatgcagggacaaggataagggtctgtatcagttataaattctttttagtgcaaataataaaatatcccattaatagtgactcaagctatatgaacctttactatttacctaaaaatcaatttagaagtaaatgatctcaggttttgttagaaagcttaggaaaatcatcaagatctcaagctccttctggatttctgatccaaccccagtcagttatttggcttcactgcatcatggtcacatggcaactgaaactccagacagtgcatacacgttcaaggtaggaatatgggagagaaagtggtgttaatgagctcttcccttgcatcttcccatcttgtaaagcatctaaaggttttccagaaggcctcagccaactctcacttatctatctttagctggttctgtcacatgctaccttcagttgcaaagaatgttggaagggtgagcatgtggaaaggtgaatgagctgccctaactggcctagactaatcctgatctagcccatggtagggtactttggttcctagctgttgggtagccaaccagtggtgtctgcctgcaggaacttcttagaagggccaaagataaaggacgaagtgtcctcattgatttcatagacacaaccagttctagatcaccggttcaaagagcgtaataaattagtagagtgggagaacacaaaattaggaagattcatttctgctttattgtgatctgggtcaatttttgctttctcaatattaatcttcaaaaagatatcctttgaaatctcaaaatccttttctataatttaaaaacaaccttaccatctgtgtcctctgtcatatggtacaatattcaagagggtgaaataatggtccagtaactaagaaaagacttaggggatgaattggccttagtgactgtcactaaaatgtaaacatggctttaaaaagtaaatcagaaggaatgaaagggccttgacagctaaggctctcaggaagattctagaaagacatgaagcacaattttgtaagtgtgcgataggagttactcttcttcttttattcatgtgtcatagaagggaaaggaaatttttaaaagagtaagaccagccagatatcacaagagtatagaggaatgtaaggatagcatgttcaagggcaacatgaagagtaagagaaaatgtcctggatgccaagactagctctctttattgcaaagcttgccagactctttacccagtacatgtactctactctaagaagaagaaacaaagctaagtgactgctaagctcatggacaatgtttttgggtctctccagcagccacctagtggctgactaggtaaaatcatttgtttttctcaagatgttgtaattctgagaatgcagggtttggctgccatgttagcctggattttctgagatgcatccctgcaagagattcactgagaaattagatgtgcaagagatttatctggggaaatgcctatgagggaaaatggagaaggagctgtaggaggctggaagagatgaacactgcagtacacgtctgatcccagtgatgggaaaaaaaaaaggaaaggaggaatgagaaaagggaaagaaagaaggagggaagaaaggaaagagatagggagggagggaaaggcaaagacaccagtgcagtgccaagaaagttttggcaaggctgatggggagtcttcaaatcaaagtcacttgaaagaggaatccccttatcatccccccaggaatgggcctgccttggtgtcctcatgcaaagtcactggctgggtggatttcagagcatagcagctgaggtcataggccagttacactctgccataggaggcttgagagagcattttcatagctgccacatttgccactgcaaccttctgggagtgatgggttgtgctggaagaatttgaagatagtatcttatgctccggataaagaaatgcattgatgaaggcccttcactattagatttatttttctgtgtcccaactattatataaattcccctatcaaggaattttcaatgttttctccttgcccttagatacgtgatcttataccccaggtttgctgagacattccttttacagatagttctactggctcatgagtgtaatgtgtctaaatgtatggttggacaaatacggttattagatctaaattttaagttcaaatttccttagcctgaagtttagagtcttccacagtctagtcccaaccactttttccaaccttaattaccattgcactttaccctgtatttcaattcatttgaaatatttgctcttttctaaattactctcgcttacccaccactatctctttgttcatactgttctcttcaactaagattaattaatcaacatgtatttattgtccccttcccatgggccaagccctgtgcttagaactgtatgttaggggacaaaacgcacatggtttctgtcttcctagagtttgaatttagtagaagagcaacagacaatacacaggtcaatggacagttcatgcttacaaatcatgtgacagtgtcaaaagtaaacaaagaaggttccctgatagagaattacaggaaggtttattttagatagagctatcaggaaagaaatggcatttcagcctgaacttgaatgataaagggaatgtagttactaaggacttaagtccttcagataccaattccatcatcttcaagatattgccatgatcttcacaaagtttttcctgactcatcattggactctcaaccgtttttagccctgtgctatctgcgtcttgtatattacagaaagtgtttaaggtcacactataaactaaatgtgtttgtctccaatcagactgtaagattgtggaatgttagatccatgtgtgatgtatgtctttgtctcttatcagactatatgattttggaagtttagagctatgtctgtatccgctataacatttatctctgtatctgcatgatacttaggataatagtatgtgggcacatccaacaaatatttgttgaatgaataaacagtattccactctctgcaagtttggcctttctgacatttgtctgaattatagaaggagaaggaggctttatataatagttgaaaattactgttcacgtaatacagagttctgaacttcaaccagaagcaagtctacagcagatgaaaacatttcaaatgagggaattagctgtatataactttaggatagggttgtataagtttagcatttatttgaaaatccattattatatgcataattaagttttaggaagaaaatctggctgaatagtaaatcagttactattttcaaacagttcttcagtagttagttaccactggcttctagaatttaactggtgtttttttttcagtatatcacactagcatgtgggttgagacacaacctcacattacaaatgggtagtcccttgacttgtagatcaatcagtaataatacaactactgattttttacagtttgtataattatttgtcatttctttcccttattatctgtattctcagaaacaaagagtagaaacaaagagaaaggacatgatgtatttttgataggctaccatctcaaattttcattccaatgtttatttggagaaacacttttatctaaaatggaccttttcatttgacaatggcacttgctctcaaaatgagaattgcgccttccaggagagttttccatctgactccaaagccttgaccctcacaaacagtgttgtttgtaatggcccctggttagaaactctcagcctaacaagcatgcagcatagcccctgaagtctcccgtcctatctgcataaatttgggatatagcactcctgcacatcaagcctcacttactcataaaatgccgggaatcattccaaattgctcttccagaggagagtttgtttttaaaattatttcagatagagatgtttcaaagtctacataaatgcataatatttttttctgattgtgctttcttggtgtttctcttgctgtaatacctacttcgccattcttcagggagcacttcaaggacttttgtaatccatatagccttcctaagctgttctaactttcagcaatcccaaccacatcactgacctagtttgtaatgactcaccagacaatgtgttgggttctctagtaatactttgttaagtccaagttatcctttctgctgttgtttctcagtgtgtgtttctatctgagctctccagttaaactgtaatctacttaagcactgggctttgtcttatactctacttctcacaactcttgcctcttaaattggttaatgtatgtttgatgactaattgtacacataatagctacttaataaatgttcttaagaaaaggacaaattaagtattttccctggtaaccctctataccaggcatcactgtggaaagatgcagagttgagaagacagcatttcaaaaactggaaaaatcacttgtaaattatttcagggattcgactttgacattatgttgacataaaaagagccttaaaaacagctattagaaaatagacaaaagtagaaacaaataaatgaatgagtgaatgacatatctaaatgccatgaaatgtgaaaatgatacaaaatgttaagctaatccttttttcttctctaattaatctccactgggtatggggaatagggaagaactggggtattcgcaacaggcaaacattcctgattcttgccctactaaagatagggacattaggagaaaggatcatctagttggaaaataaactggcattgctaagtctaaatgattgagtcaagtgcaaattttataggccaaatagaattttcacaagtccattgactgttgaaaactacttgtaccctggctcaaaggacattttcttgctgtctatagtaagcggtctgtaaactgtgtttgggaccagaaccaaatgctagcctttcatttctcaaattatagcttagtaatcccagctcaaaagtccctgcatacacaatttagtaaaattagcagcataaatttagaaccagaacgtaactatgctttgttccctccagaagtaaaatgtgaaatttcttcccattggaagtctatttatcacttaatttcagatgttgtgatactgttttcatccaatgttagagaacagaaagaaaccttttttaaaagcataactttcattattcatctaagtttttttcagggtccatgagaaatgctaagattatgccttgtgtttgagaaatagaaaaggaaaaagggaggaaaaccacctagagaagtgcttctcaaacttcaaggcacacgtgaatcacctggggaccttgcagattctgattctgaaggtcagaggtggggcctaacatcctgcatttctaaggagcttccagggcatgctgatgctgctggcccacagaccatactactttgaatagcaagctttatcggccatagaggactttttttttctttttttttttttttttttttttttttttttttttttttttgcatggaacacagattactgctctactctaggttacaattccaaggaaataatgactgaaggaaaatactgctatttcaacacttctgagtcatttagttagaatggaaggttaacattagcaatttaatgtggtgggagtatttattgatgtactaatttgcactttgttcctgccaaagctttttactctgttggctccagggagtttgaaagcctaggacagaattgtacttcctaggtttgtttacctattgtggcaaagaagtgagcatctttggagttaaggagagttaagacccaaggagaagaaaaagaaaaactatgaaggctttttaaaatgtgtatccctgtgtaagatctccaaggaccttcccttgacccagtagtagcaaacggaccacagtgatggctgaaattgagtatctcactaacttggtaaaagttgggcaggctcacagtcagacttaaatcattttagagaagtacaataatgtggcattccttgcaccctgatgatatgcaaaaaatacatacctgcttctgacggaatttaaacatggactgttagcaagaatgtacccttaaagttttgtaaactctacagcaaaggaaaaaaaactgctacagaaaaaataaggatttttttttctagctttaccagtaacctataccttcatttcttcatgttactaattacagaaacttttagcagaaatgtatcactcttgggcatcagctagttctaaacattttagctcttaggagcctctggtgacaactgttctgttgttagttttgctctctgactagattgtaacttctaagctcaggaatcctgtcttcaactagttctctttagtactaacctaaccaagagctaggcatttaggaaatgctcactataaatgtattgacaaatgattatgtgtaattagctcttcatcacaatatttttcatcatcaagaaatagatttaagggagatattttcaaacagtatgtatatatcatccccttacctttatgtatgtgtctgtttgtgaagtcagcacatattatgtgctaaactcaagaaactcaagaaacaagggaggttactttctaagcctgcatcatagcagtagaaatttggaagaaaaaaaaaaaaacccatacaattaactgagttataattaaagaaaattatatgactaccaattgtaatatttctaaaatatacccacatatgccaatctattgtaagaaaatgttcgcagagggaaaacaatgtaaattcctagaagctttagatagattctaatgattggaaataagtattacaaatagtccacattttaatgtgacttctagaatgttttggaggtcatagtatccactcacgctcttatgctgcttgcttacaacatacacttggttcccatttttctcttaggaaagatcatactaatgatctgtgatcatatttaccacttggggatcttgctggccatgataaggaatttggactttactctgattacgtgggaagccactagagaattttagccagtaaggtagcatgatctttatgccttaaaaaggttaattgttttggtggatagttgttttagtagttaattgaaggaaggtaaaagtggaagtaggaagaacagttaggaatctatttgattgttcaggaaaaaggtgctgggcgcatgggctataataacaaaggagatggagagaagtaaatggattgagatggaactgaaagaacttgttgatggttaaatacgaaaattaattcaagatggattagagacttaaatgttagacctaaaaccataaaaaccctagaagaaaacctagggaataccattcaggacataggcgaggacttcatgtctaaaacaccaaaagcaacggcaacaaaagccatagttgacaaatgggaactacttaaattaaagagcttctgcacagcaaaagaaactaccatcagagtgaacaggcaacctacagaatgggagaaaattgttgcaatctactcatcagacaaagggctaatatccagaacctacaaagaactgaaacaaatttatgagaaaaaaacaaacaaccctatcaaaaagtgggcaaaggatatgaatagacagttctcaaaagaagacatgcatacagccaacagacacatgaaaaaatgctcatcatcactggccatcagagaaatgcaaatcaaaaccacaatgagataccatctcacaccagttagaatggcaatcattaaaaagtcaggaaacaacaggtgctggagaggatgtggagaaataggaacgcttttacactgttggtgggattgtaaactggttcacccattgtggaaaacagtatagcgattcctcaaggatctagaactagaaataccatttgacccagccatcccattactggggatatatccaaaggattataaatcatgctgctataaagacacatgcacaggtatgtttattgcagcactattcacaatagcaaagacttggaatcaacccaaatgtccatcagtgacagactagattaagaaaatgtggcacatatacaccatggaatactatgtagccataaaaaaggatgagttcgtgtcctttgtagggacatggatgcagctggaaaccatcattctcagcaaactatcacaagaacagaaaaccaaacactgcatgttctcactcataggtgggaactgaacaatgagatcacctggactcgggaaagggaacatcacacaccagggcctattatgaggaggggggaggggggaaggatggcactgggagttatacctgatgtaaatgacgagttgatgggtgctgacgagttgatgggtgcagcacaccaacatggcacaagtatacatatgtaacaaacctgcacgttgtgcatatgtaccctagaacttaaagaataaaaaaaaaatttaaaaaaaaatgagttggaggaagttagagaaagtgaagtgacaaagatgactcagaagtgtttggcttaagtatctgagtggatggtgaaacaattttcagggataaagaagaatttagaaagaatagtttttttcagacattagtcaagagttctgtgttaggattgagatgcctattggataccaactgaagatgctgaagaggctgattagagtctgaagttcaatgaagaggctcagactgaagatagaaatttggaaccatcaacgtgtagatgatatttaaagccatgagacttgatgagatgccctttgcaagagaaaaaaaaaaaaagctacaatattggagggaagagttttgtgacaggacaatatttatgggttaggcagaggaggagaagcagtaaaggagaccaagaaagaacactcagtgagctagaagtgacagnnnnnnnnnnnnnnnnnnnnnnnnnnnnnnnnnnnnnnnnnnnnnnnnnnnnnnnnnnnnnnnnnnnnnnnnnnnnnnnnnnnnnnnnnnnnnnnnnnnnnnnnnnnnnnnnnnnnnnnnnnnnnnnnnnnnnnnnnnnnnnnnnnnnnnnnnnnnnnnnnnnnnnnnnnnnnnnnnnnnnnnnnnnnnnnnnnnnnnnnnnnnnnnnnnnnnnnnnnnnnnnnnnnnnnnnnnnnnnnnnnnnnnnnnnnnnnnnnnnnnnnnnnnnnnnnnnnnnnnnnnnnnnnnnnnnnnnnnnnnnnnnnnnnnnnnnnnnnnnnnnnnnnnnnnnnnnnnnnnnnnnnnnnnnnnnnnnnnnnnnnnnnnnnnnnnnnnnnnnnnnnnnnnnnnnnnnnnnnnnnnnnnnnnnnnnnnnnnnnnnnnnnnnnnnnnnnnnnnnnnnnnnnnnnnnnnnnnnnnnnnnnnnnnnnnnnnnnnnnnnnnnnnnnnnnnnnnnnnnnnnnnnnnnnnnnnnnnnnnnnnnnnnnnnnntaggcagttcattttacacacacacacacacacacacatacaccaacacagcatttgctacagatcctaaacttgaagccctggatcttccttacatcatttacccagaggtatctttgtcaacctttttaacttatacccaccagaaagtagaacaaggcagaagttgtgtaggagttctgtccctcccccctcacctcctggcctcagcacaataaatactgtgttgagaacttggctaactgcttcttttcccacattcgatcagggaatacttaaagccatacagtgtccctgttcttccaaaaagcatatggggcaggttgccccttcaggctgacacaaagacacactgtgcaagacatctatggccagtggagtggccgtgtatgttttatcaatgaggcttttgacttgtttctttatgtcgtattgtcatcacgttaaatagaattcaaacaaggaaacgaaatttatattctagacttttaaggcattgcctgccttatagctatgaaactttttttttcatacctggtataattttccaccttaaacgatgttgtgtgatttgattatggttttgactctcatttaattgttcattttaaaatttttaactgaagttagatttagatttaaagttcagtgcccataaaggatacttctcaatagagccaagaacttcagaaggcacaacacaaaaagggcaaagttcaaaacactaagcatcaggtaggtactttattgtccagggacttgtctaggtagactgtcaccttatccatcttcattcgctttctagtagagcttccatcttctactgcaaaatagtttctggaaccacttccatgttgaccaaaagagagtgtcaacaattcctttccaaaattgccctttagaaagtgaatctaaaatgtttgattcaagtatgtgagggtagctacatcaaagttttcttttttactatgtacaaaagtgacagataaatccatgaaatatgtgcatttttctgctaagactgcttattaatttaaaaagaggttgttagaataaaaggtcagagagtcaacatattacaaatatttattgagagcctgctgtgtgcagagttggaaaagataaaatgaggttgctactttcaacagacttacaatctaattgagggagcaacaacataaacatgcaaagcaaataatgcaagatacagcataagacataattaactatcagatgagtgacatatataataaataccattaattcaccagcaatcataatcagaagcactatgtgccaagcattctgctcagtacttcacatacattatatcattttttgaaatattatttctactttatagatggaaattgcctctgatcttccctcctttctggagaaagcaaggagaatggtataaggtagacaaagacctaagcagatatgttggtctggggcaaagggtccgtttaggggaatggagagaaatgaaccctgggaccagcattagtctgtttaccaccgtatcccagggcctagtattgtgccttgcacataataggtgctcaataatatgtcttaaaaaacaaatggccctctggtctgtgcctgtaacccagaccaagtaccatggaataaagttaattagtgaattaaagccacataccacatagcctaaggacccatccccaagacctcccaattcccaactatgacggtaaaggatcgcagtggaaaagatacatcatagggggatagcaatagcaattccagcttactggggcctattttatggaatctgacatggtgaacagttcataagtttatttccaggcttcaagaccctgcaacatctggcctcttgcacctccacaacctcaaatccttctattcttccctcactcgctctactcctgccacacacacctcctttctactcctcaaatccatttcagggcctatattcttgcttcattttgcctggaatgttcttccacaaaacatctgtgtggctcattaccataccttcagatctgtaagagccactctccccacatcttcccagctgcctggcattatagtacacgtctatttgcttatgtgtttgtccccgtacacactggaacatgggtccagcgaggcagaattccatctgctatttttaccattgaatctccagcacataggacagacatagcacattgtaagtactcacacacagcaactcttaactcaggattactttttctggctctgaaatacctacttccaagagaacgaaatttattcaagaaatgttggatggaaattgaagagtgagcttggaaacggcagacagagtggcaggagcccagaccaacctgtttatgaaagatgcctttgcccataaagggaaaaatacaccttaaagcctctgccaaagtatatgctttcttaggacacctctgacatgctgaatggcacctggtctgaacaagaagatctatggatttgccaaaacaactaattcctgggacttaagaataactactaccagtatcatcctagtaaacaagtagcaagcaacaagcaccacatgcaaaatcattcaaatgccttcatgcaggtgacagtcagtggaagaaattaatcttatttttattattttttcccttatcaaacactagcaagggaccagatgtcataaacctagttaaaatatgttgactttacctcaaatttgagtattcatggttccaaaaggacacttgttataggatctgatgatgtactttaaaatcttcttttgtgcaaactgaggattcagagaccacaaaatgtatggtaaattcaaagtactattataagtaaaatcataatgcctcacgacatttttgaaagtaaaatatttaggaatattacaaatatgtattgagcactccctatatttaaggaactgtgctaatgctgtgatggatcaaaaggagaatgagccatgatccttaccttcagacttcaagcttattattcattgggcagttagataactaacatatcagacaaggaataataagtgccattgtccagatattaaaaacaaaattggtgttgtggaagcacaaagaatgcagagatggatcccaactgggagaaagaaaaagtgcttcctaaagaagacgctcagattgaccttgaaagttggatgcttttgcacaggattagaaggtaggaagtcttcatttgttggacttgccaattattttggtgtaaatattcccactgtggctgatttaaagttgataacgtgatgcaactgaacacagaattgggaagagaaggtggctctagcacactacctatgagtcaccatctgagctccaggcttaattaaatcagcctcctcactactattttgaatgagtgaaatcacaaatcttaaaaacatctatgctaacattatcagagaagagatagtcacttctatcattctccattacaactccatctaactttctaatattctctttgaatatccttccaatctcagtctcagtcatatgttcctggctggcctacctagaattaatcttggcacagtgccaaactgtgattctgtttgttccttttagcattgctgtgattaatctgcactcctgttatcacatggcatagaaaactctcttactgattatggcctggtgttgacacctctgctgttctccgtaatgaaaagcagctttcagggtggctagctgggcaggatgtttcgctgctcttgtaacagtaggaaggaaaaactggaggaattactgggaagctttgcagaaggaagatacaggccagccgagagccagcattcctattacctgctcctttcagtattctttgtgaaaacaccaccaccagtgtgttccctggacgtcactactgcacctttaactggccttattatgctagggactacattagaaaagccagactctagtatctgtctgtaattgcaagcggatgtctcagcacatgcacaagcttatgtcaggaggatgtttatgaaaaactcacaaagcagagcactgctagacaggaaataaatatgtgaagcttgaagttgttaggaaacttccacatttgtctctctaagccagagataggacctgtgagaaaagaaggtctttatcattgcacattgattctcgttaccttgaagacttgcttttctcaaaatacatttacagcaaaatgtggccgctgcagatttatttaaacatgtgcttttttctatgacactggtttctcttccaaatttgttatctattattttactgtaaagcattaaaaagtgtttgaaaccaccagcaccatttcacagttcctgtgttatttgtttaaattctctagctcatgtaatatgccgtatgatttactgtttaagtatagaagaaatacactccctcatggagatgtggagatgtggagaggtaatactgtctcctggaaaggctcagagatttcctgtttagattacacaggcttctttagagctgccaagagtcataacatgtacgagataatacactttggttcaggagaaactatggatgggaatgtaattaattcactgagccacaaaagaaaggaaattccagcgtagagctgtcactgcactcaggcccggtggacttggtatgccaaggggtagccatgatcaaaaagaggattgcagcctgaggacccactgagtagtatccaaccacagagcaaaaggtgggggcctggctgctaagggtctcacctggttctttgagaattgatccctgaagcgtatttctgctcaacacttcagcaacctggcttcatcagtataactttccagaatgcttgtgacattgagataaatcaatcagcatgtactttatcaaatgcctcctcatgagtaccaactgtggcacatagtggggaagccctagaggaagaacgctgaagaggatatggtgattctgatcagcgcaagaaggtatagtgaaaagtgtcctgaactgtgtcttgtcataagaatcgcctgtcagggaggggtgtggaagggcaaggtaagcatacatattctcaggacctttccaaaatgtagagtgaccagggacctagagattcagactctgtcgatctggaccaaagacctagacttggtatatttaataaatgctgtgtgaggccctttacatgcattacctcctgtaattgtatagaacagttgctgtatatggtactatgtttacttgtatttgcactgtctattcagggatgtttcaaaatgccattgctatccaactggtgaattattattcttgccagaacattgattctcctactcttgctcccttaataatacactagagaactgggattgactgcatttagtctcaggctgaatgaatcattgccataagtagatttccatcccctactccaccgatacatttgccaaacactcttaaagaatagaaaccactgcctacatacagcctgcaccgggaggacctaaatagtctagctgggtttatgacaatatcccatcttcacatcagcaaaaccctaagtgcacaaagtctaatgtaaacacattagactccataggcatcttctccataggaaaagacatgccccggctgtcaaggtagtggctagcaataataacaatgacaaaaacaataacaatgataaacatgtataacatttacttatcactaattgtattgtaaatgaaatgattagcatatactaactgatttaaatcttatatatgtatagatacttttactctcccaattttaaacacagagaaaccaaggcccagatacgtgtttctgttgggaagttgagtacaaagttgggtgtaagtagggaaagttcaactgcagtcggttctagtcttggtaagtccactgtgaggtgctccacctcaaagcatagcaaattagtagttccccatgtttgcagaatcaaaattaagttctttggcaaggttctccctgatgtgcccctgcttcttccctaactcaacacatcctcagctccatctatgcactcccaacacatcacaactctttatatgcccaggctgtgtcttctgtacctttgtaccttctgcacctttgtttctttagcctcaactgccctttcttttcctctacattaccctttatcccaaatttagcacctgtctcaaggagtcaccttccccaggaagtttgtccaaatttgttaacagatattccattgttcctccaatgcttgatccttctttctttatagatccctgcctagaaaactggactcactgaggccaggggctgcaggtagtttattttataacccagcatttaaaagtgcctatttattgatttgttgggaatagttaataaatggagtccttgcagatcataaccaagagcacagtttgtaatggtttcattaattttgttactattggatgtgattctctgcttatggtcttcctttacttgtttttcccttactgctcagcacctgtagatattaggtacatggctctgacactaattaaaattgatgactgagaatgacacttccatttgctaagccagcgcaattttgttcattgtgctttactttttaacgagcaccctctcagcagtagcataaatctatagtctttccatgagggtaccatttgttccttttatgtcttgattcattacatattttcaggagtgtgagctgattaagagtttttggtttgtgaaaatgtcaccaaatgcacgataaaggcaaagtcaccagatgtctgcttgcaaaaaaattaaatgctggtttgtgaagatccaaggctggccagggctccccaagcatttccaggcctgagctctggctctacactctccttagggtctcataactgacccccacattccatttctgccatcatggaaaaattcgtcaactttactgctgatgttaggcctggaaattgtcgtccattcgttttctcagattcaagctgaaaatggagacaaacttcctacgtaattttgaccaaaataacacatatgtttatgtgctatcccataattaacatacttttaaaatcactttcttgaggtatagttggcgtacaaaaatatgtgcatatttaatgtatacagcttcattaatttggagataagtatacatccatgaaattataactgcatgtatgccataaacctattacctacaaaagtttcctttcactttctttgttattattttgattaacttaatttttttcagccttcgaactatcaaaattttctcaagtaatacatagttgtcagttatacaaacttactgaaccttgatcgaaggtcctcctttagtgctcaacttagagaaagaaataatgaaacaaagtgttctctgatttgtagcaaagatctgtgatggtgatgggaatggttctagaaaataatgataataataaagacttagagtatcaaagcagcaagtatgtttgaaggaattgttacaatgcagttttgctttctggtcactttaaaatcaaggtgtagtactttatttactctaggaaaatgtttgctttttgtcataatttcttattgcatatgagagtaaatgatctatagatgaagatattagtaaaatttagagagagaataaaaaagaaacactttcacagctgaaaggctgcttcccagttagctaactgggaggagttaatgaaaaagtacattaaaaagcggctcggggaaggtgaattggactcaccgggctctgacattcagagagatgggaatgagtcagctcactgtccagtacatctttattttctttctctttcttgttttatatcagaaatagatttcttggcattgttactgtgggtttctattaaggactgaaacaaaagtattaataatctgagagtatgtagaaaacaaaataaattcactttctcccactatactctcacaacacagaatattttagtgaccagagatcaccaaaatgtgtgtggtgttgaccaaaagagtcaaactctgtaaaatatttgaaaagatttattctgagccaaatgtcagtgaccatggcccatgacacagccctcagggggtcctaagaacaggtgcccaaggtggtcagggcacagcttggttttatatattttagggaggcataagacatcaattaaatacatttaagaaatacattggtttggttcagaaaggcaggacaactcaaacagggggcttccaggctataggtaaatttaaacattttctggttgacaattagttgagtttgtctgaagacctgggattaatggaaaggaccattcaggttaatatatgtttcttattggacctaaaacagtgcctggctcttagttgattattgcctggatctgggaaggaaggaaggaaaacaaagggggaaggagatttgctatagaatgtggatttttcccataaaagactttgtagggccatttcaaggcatgacaaggaaatatattttggggttaaatatttttttccttgtctcataatgttataccagagtcagattgaaaatcaagtcacaatatacagggtcaaataaaacccatctaatgagaacccttggtttgtaggtcatgactcccttgggtaggaatttgggcaagataaaagattgaaacttagtcctgggtgggaatctctctccacacaaattctccaacaggttcttcaacgggacgccaattgggtgttctctaattcaattcaattctgacagtctatctatctacctggaaatagcatcagataccacaggtttagggctcagtccaacaatactgcccgtcacttcagatgccaattgcaagtaataggttgttacctatacttctggccaattagctgtaagttggggttcccacaacctcctcctcaggtttggtaatttgggacagcttgcttacatttaccagcttattagaaaggatattacaaaggacacagatgaagagatggataggataagatatgggacttggagttgcagagtttccatgacctctctgagtgcagcatcttcccatgttcagctatccagaatctctcacattaagacattggccactggtgatcaaattaaccttcagtccctctccccttcccagaggttggagagtggggctgaactgtctcaacctctaatcaactcttggtctttcctgtgaccatcccccatcctgaggctctccaggagcccccaggcgtcagacaactcattagcatacgaaaaacacttatcactccagagatgccaaggattttaggaactgtcaagaaacagaaacaaggtcaaataggtatttcacaatatcaccagtagtttcactgggaggtaaaactcaatgtttactgtgagcctgagctcacagtaaagttatctaagttatcacagtaaagttatctaagaataacttagaggtaacgtgatcagatatggggaattctggagaaacacctttcactaccaaacccagacaagagatgcgtacttttctagctgggatgcttacaaagcaacccattgtaatacttaaaggtagagtgacactacattcatcatttttcattttttcctgttttttatgccgcctactactaatgtcaatcaaattatgactgtgtttatactgatcatctcacatcataaacttgatcatctcacatcataaacttctgtgtctctcatgttgagcttttcacctcccttcattccctccctacttccaggatcattcacatgttgatttctaaaaaaaactttttttactgaacttattttcatactgtttaaaaagaatttatatttctcctcattcttacaaataagattcaagtttaaactcaaataatgtaggaaatcattttttttaaaattgttccctactgtgtctaggcttgagaccacaggtaattaagaccaggttttcatttgatatgatttttatgagttctttttagaggttaggtaggttaggcacaatttttatttttaaaaagcgggttattatgagaggagaaatcatactttgtcatttgaaaatgatgccataagaggtgttagcagaaaaatcaaactgtaaaatattttagagatttattctgggccattataagtgactgtggccccactgaaatgagtgagttccctgatcctctcacagagcatgcgacaggggtctggctcacctgttcagttgccccactgctcaaacccctagggggagaatacagacagtcaggtgcagaggctggggcaagtgctttggccccttagccctgcagtagtgtctaggggtggggtgcccgcaaccccagtgttacaaagttctttcagctttgcagtccacagacagctggagtgttaatcagctcaatggaccctctgccttatagcaagggcagaaggccagagtgacagctttctgtattccaagctcttgcccagtgtcctagaaaaataagatcatacagggctcgaaggacgagtgcagggttttactgagtagtggaggtggctctcagcaagatggatggggagtgggaaatggggatggattgggaaggtgaacttcctctgaagtccagccacccagtggctggactcttcaacctcccccagccaagctcctctcagcgcccagatggtcctcttctctctctctctctctctctgccacatcatttcaccatctgtctgctggtcagctggcttgctggtgtgctggtctgttggtctgctggtctgcttctggaacctgggcttcagagtttatatgggtgcaggatagggggtgttttgggccaaaaggcagctttttggacatgaaaacggaaatgcctgttccatttagggttgcaggtcttcaggcttgagggtgggacctttgcgcaggaactaccctcttctacccagtgtttccctgtctcctgtccatatcaccagtatacacagtctcaaggagtcctgagaaagtgtgcccaaggccgtcagattcagtttggttctgcatgtttcagggaggcaggagttacaggcaaaaacataaatcagtacatggaaggtatacattggttcagcctgaaaaggcaggatatcttcaagtggggacttgcagggcatagtttggttcagagattctttaatctgcagttggttaaaggaacaaaactttgtacaaaagcttagagttagcaaaaagaaatatttaaattaagataaggatgctatgtcagagtcagccacaaaatgacctgtttagcaagattaatggcctacaggtgtgacttaacccttgccttgcatggcctaaggtcttgtttataatttagtatcttattgcccaaagagtctattttgtcggtcttatgatctctattttaacattaatgctggtcacttgtgactaaactccaaaggggaggcatatctgacttgccttcccattgtggccaggaacccaagttttcaagtttctctggagtccccttggccaagaaggggtccattcagttggtttggggagctgaggattttatttttagtttatacagggtcgtatgagattgttaggacaggaatgactaatgttttcttctctttctgtttcagccacagcagctatccttagcagagcatcctggagtctgcaaagtgttaatccaggcctaaagacaagtaagaatttcagttctttttcttccttcaatgatattttccatgttttagtgtaattaagctactatccttctctgttttatttgggatgttagtaactggaatagtgactgagatgaaattttataggcaagcaaaacattttttaaggatttgtttcttaacttctgatatagtttggatgtctgtcccttccaaatctcatgtcatccccaatgttggaggtggagcctaggaggagatgtttgggttatgtgggcagattcctcatgaatggtttagcaccctcttctttgtgctgtcctcaccatagtgagtgagttctcatgagatctggttgtttaaaagtgtgtggcaccccctcttcaatctcttgctcccactcttgccctatgagagacctgttccacttcaccatgattataggcttcccgaggctttcaccagaagcagatgctaatacagcctgcagaactgtgagccgttgaaatcatttttctttataaatcacccagcctcaggtacttttttatagcaatgaaaacaaactaatacaacttctctgcaaggctgctttttctatttttgcttatgcttagaggttaagtaaggccaaattaatgaaggaggaaaaaagaggaaatgatacatcatggatcaacaattatttattgaatttaggaaactgcctctttttacaaattctttttaaaattattatcattattatcttgaagtatttatctaaggattacattgatagaaagttaaacttgtctctccaaccagattgccttaagcttcagaattatgccttcttgtaagctccttcttactcttaaaatgactttacacattcccccctggtcctttgacaatctcctcttcagtcacaggacagaaccccaacatcaactctgtggggaagcttctccaaattctctaggcctgaacaattttctgccttctctgcttccgtggaactttgtcctttactacatgatagcgtttacctcctgacattttagtgtgtttgttagccctgcatatagaactcaccagattgtgtggactgcatgaatgaattaattctattgaactttaaggcaaagcctaaattttatgcttcttctaaatcccttacatctcctaaaaaaaattctgatccatagtagtaggtacttgtttaattaaattttagggatggatgtttttcatcagtggaagtatatgctagagtccatattatgcaataagggaagggaagacagagtacctaattcagttaagatattgctattcttgttagtaattctggagtcatgaaatcataatttgaattttatgactaaattgcagaataaatttccaatgtgagatttaaacattatttccttggaggtgaccaaaaaggagagttggtactgtttttaagaactgtcattcaattgtcagttgtgccagagcacaaatcctttatagccctcctgtttaagaagcatctgacatgctaagctgcttcctaattaacacaaaggttgtaaaagaagtggctgtttggttgtgtttgggttatcccagccagtatattccaaagcttccttcattcaacagatgagtgatctcctttatattctgtaaggaaatgagaagtaatcagttaaacatgcattactaatgctacatgcttcacattgaaaccatcctcctgacacataatactttaccctctgctgtcccccaaagtggcagtaggatttctgttaagtcattttctttattaggtcacaaggtctaagaagcctaaacattgtgccttgttgaaatataacctctaggtatggaggatgtgttgaacaacttcctaccagtcatttggcatatgttgatttcctgtcttcatgatacataagacaactagctaattatcattcatatgtggtaaatcacatagatactgacttcccctatctttccagctttttcttatcaaaagttacctgctttctgtcgcaggaatgattggctaaagtaacctatatcagggtctgtaacagtgggcacctatcagagtgcacatgcttgaacatatcatcgcctttatcatcataagcctcacatccagatgtgatagacccaagtgctcacatcccctcactctgtcactgtatatgttgttaccatatcacaaatatttaacaatctgctgtgtactcaacctttagctgtatgccctgagggagacagagtaagatactgccctgacatcaaggagctcacatgctccctaaagagataatttcacatgaaaagttagtgtttaacatgaaatgtcctgagaatatacaattgtaatttgcatgtttcctatgtgtacttttctaagttctcagattcaaaacaaaaccccatggaagaaaaaatgaaataaaaaccctgtcaggacaaatcctagccagaactgaccaaacataaaaaataaatgccactgccctctccaagccacctttactttatacttgggtctaagaagcccaaacattgtgccttgttgaaatataacctctaggtatggaggatgtgtcgaacaacttcctaccagtcagtgaagtgcagtgaccatttagcagtatctccttcctctctctttccacccgctgccccatctctccttccttgcatctatcttctcctgccaacaataattttcttatgttctaagtaaatatctttaatgctgtccctactacctaaacattaaacttcaaacctttcccaagaccctgaacacccaccccagcttgtaagttcaggctacttacctgggaatcccagacacactgtatattccctcctctggtacactgctcatgtcatcgaatctatcttcctcccaccccgccgtggattctgtaaatatatatcagtcctacccacctttaagtttcagtcaaaacctgatacttacggcctgaagcaatccctctgttctccatgctagtctatgagagaggtcatgatatttcagtagctctggagagacacatatggtcaaaccagaccagctcaaattaacccatgctatgcaccacctaaagaatcacctcttgctgtaacctctttcttcaccaaaaattatctgtcccatttgctaagtaagcccttagggctttgctgtgcctgcaacaggtcttaatccatgtgaatgtgcatttttgtgttagtgagcacatgctaacatgccttccacagattagtttctttagaaacattttctggggaaaaaaaagatatatttttggttagtaaccccaaaaggacctttcagttcacgtacgtgggtagcagcatactccacttacgcaaaggtcagcccagggtaaatatgagcaaaaacacatacttaggataagaagaatgttgagggagtttacagtttaaagagatatccagacaactttttatattttaaagaagtaatgctataattttactacaaagaaaacttctttttgtttctggggagaagaatgagaagagttacaatctcctagagaaaagcaaaacatttttagtactcccaaataagacaggcacctcagctagggtgctgtagttgcacgttctttgtgttttttcaagaattttatttctctgtcatgattatttattggcagaggatttgatgagcatttgggccaaatttataagactttcaacacatatggagaaaaaaaattagatgattgcacatctttctgagggagatttttcccctgttttaaaagtcattgcttttcactgaatttatcatgtattcctataaaagtgtaaattttgtgattgatagcatttttacctcaaaataaaatgaatatccaacaggagcaagttttattgactgcctgttggagcgtaaattagtctaaggtttcatgaaataggcatttgaacatgaatattaatggctgagatcagaggcaacttttgaaaggattccaaaatattatcatattagattggcacagcaaatgaattgcttgaatgctagaagttcacaaacattcaaacaattgtgagttacattaacttcaataaaaacttttgcaggacaaaaatttaatgtagtaaacttcatcttgcttgtccaggtccatatacattcttagctggactcttgtcctagcttcctaatttttcttcctacctcctatttttccctattccaagccaccatacttgctcttgattaattcttcctgcctatctctgatttagtgattcatctgcccagtcatctatagtagctccaaactgttctctaaattatgaataaacttatctccctgacattcagaaaattctacagcattcatcttacacacttttctagccttatctcccttttctcctttgtactcctatgtttatattccctgcattcttgcttcattgtatccatttacattggcccttttaccagtaatttcctcttctttcccctcagtctgaaacagtccttcatagattttgtcctataagccatatttcaaatataactttatccacaaagctttgcccagttacctcaagagaatgcatgcttctgctttagaattgtagcctttttttcctctctcgcaaggagagagtgtagcaccatggttgaagtactcagcctctggagtgagctttagtttaagacccagttctactgcttacttgctatatgatcttatctaaatttgataacctctgtgtcttttttttttttcaaaataaagatgctaatagtacctacctcataagattgttgtgagaattataagtgttgatacatttaaagtagttagaatagtatctggccctatagtaagcttacgtggtatttattgtattctctcatggctcatattttattccaatgtgtattaaattgaactgtatgaaattgcccatgtcaactctatattggaccctaaaatcattatgtcatgtggttcaaccaaatgtagtgctttttgtacccccaccttaatatactgaactatctcgaaagataaggactatatcttatacattgttgtgtcctatggtacctgctgtgtacctaacacatgctgagtattttatggatggttattgaattttgcaaatgacacacacacacacacacacacacacacacacacaaaatgcannnnnnnnnnnnnnnnnnnncacacacacaaaatgcaaaaaacaaatagaagccaagaccttcccagtatcttaagtactctttggctaccacagagtttcctccatgtggttcagcagtcatttatgaaaggagagtgataaagatatacaggaggagaattttatcttgtctattgctgagtataaatactatgcctttcccaaaagccttccacagaacctttccttcaggtcagggacctagtgtcatgggtcggtcttggataacattgcaggacatatcagttcaactgccaagggaatcataaatagtcctactcctgcctgtggcccaccactgcctccatagaaggtacatgaccctctctgctttcattcttttttatcagatattttcaacatcaagaacttattagctgataatgcaactaaattaagtataacataagggaaatgtgtcctggcagggatggtatcttagagtgaatgtacagcctttatttgttacaaaaaaaaaaaaaaaaaaaaaaaaaaaaaaaaacttgagctttggacaagcaatagggagcagcattgatactgggttctgacatggaagctgacattaaattcttgacagtctgcttgtttataaactattcagtaaacaatttagtaagtaaacatagattcttgctatctcttttaaggaaagagtggttatggtggctttctcttgtacccaacctagtgctcagcctttcctgactcacataagcactaatctccagataacaccaaatgtcctagggttattatttatcccccttccttgttctctgaaataagaggaaggcaggtaaaattatgcactttatgtaagaagaaatagaggtacagagaaaacagcttaagtctcttaacagcccaagagagtgaagaagatattgccagtgcagtgagttgtatctgtccctaggtaagcaaaatattaataaaagcatacaactatgttaataattcaaacagtctttacttatatggactttgcagtgacttttttccagcctgaaatactcagataatgactgccattagtttcacacgttagtgctttattatatactgctttgctttcacacgaaattgttgggagataagaattttatgtaagataaatattgggtcttaacttttttataccccttcaacttcaagcaattttctgagcaatggtaagtggtaaatagatatttaccacttaagtttacaagagacctgtttctctctgttcattggcttaggcactattaatgaaacctttggaatgcaggtcccttctggttgtaaacatatatcgaggtcttctatttcttttggaactcaaacaataagaaaataattagaaatctgtgggcataggtctctagaagccttaatcttagaagtgagtaaaacaaatttttaggccaggctcggtggctcacgcctgtaatcccagcactttgggagaccgaggcgggcggatcacgaggtcaggagatcgagaccatcctggctaacacggtgaaaccccgtctctacttactaaaaattaaaaaaattacctgggcgtggtgacgggcacctgtagtcccagctactcgggaggctgaggcaggagaatggcgtgcacctgggaggcggagcttgcagtgagccgagattgtgccactgcactccagcctgggcgacagagcgagattccgcctgaaaaaaaaatattttttttgtaaagcctaggaaggatgattaagcatcttcctaaaattttcagtatgcctgtgtacactgtatatactgacttctagcatggtttctttgccaaagcataacacatagtttttaaagggataattcaagaccaacattctttcactctgggtgaccccaatgggtggtgaacaccttttagtaactcttgaaagttaaagcatccagcagttggttgtgacctttttggttgtgacctttgagttattctagcttgtagcccactgacttgctgctcagttccacagcttcaaaaccagctctaatcactgctcccaagagagccctagcttctgcatacaggaggctctcaccaggaaaggatacctgaagtccagaaagacactctgtccacactggctcctccttgtagggaacagttttttcaaataatgtacatttatgcactgggaaaatatcttgaatttattatttaggtgtaaccagactttaatacaacttaacctacacactgggaaagcagactgtacaccacatttacaaaaagatttatggctttaacaacgcattcaagtgtagttactgctaaatagcagttcaagtaattgtgtgtctcatggcaaatatatgcaatgtaaggtaatatatatttaaaccaaaaataacaagaggtgattatttgctaaataaagaacttattacttaggaaaaaatgttatacaactttcaaaggacttttaaaaatataatatgatttataggaaatttatttgcgtataattcacaatgtctggtacaaagtaagctacctctgtgttttttttttctttaggtcaacaaatatttaaaccaagggttggcaaactggccctcagaccagatgcttatttttgtaaataaagttttattggaccacagccatgcctgtttatttcagactgtggctactttgaggctacagtggcagagttgagtagctaagacagatcataggtccacaaacctaaaatctttactctctggccctctaaaaaaaaagtatgccaaaccattctaaacagaaaaacaattaattctttttttccaacttttattttagattcagggagtacatgtgcaggtttgttacatgggtcaattgcatgtctctgaggtttggtgtacaaaaaatccccttacccaggtattgagcatattacttgatgtttttcaactgacaccccctcccaatcttccccactctagtagtcctctgtgtctactgttgccatctttatacccatgtttatccagcatttagctcctgcttataagtaagaacatacggtatttggttttctgttcctgcgttaattcacctacaatgatgacttccacatgcatccatgctgctgcaaaggacataattttgttcttttttatggctgcatagcttttcatggcgtatatgtaacaaattttctttatccagtccaccgacaatgcgcatctacgttgattttatgtttttgctattatgaatggtgctgtgatgaatatatgagtcatgcgtcctttttgtagaatgatttatttttctttgggtatatacccagttatgggattgctaggttgaatggtagttctgttttaatttccttgagaaatctccacactgttttccacagtggctgaacgaatttgcattcccacagcagctataatatggttgtttgtttgtttgtttgagacgggtctcgctttgttgtctaggctggagtgcagtggtgcgatctcggctcactgcaacctccgcctcccgggttcaagcaattctcctgcctcagccttttgagtagctgggattacagatatgcaccaccacgcccggcaaatttttttgtatttttagtagagataggggtttcaccgtgttggtcaggctggtcttgaactcctgacctcgtgatctgcccccctcaggctcccaaatataatatggtattttaaggaactaatcatcaagtttgtattggttaccatcttttagtctcctgttatcttcagtttcataattggcattaatgacaatatggtattcactttataaatttgcttcatagtaaactcttctgaaataaattacagtcatgcatcacttaacagtggggatgcattctaagaaatgcataattaggcaatttcatcattgtgtaaacatgaagtgtacttacacaaacctggttggtacagtctgctgcacacctagcctgtatgatatagtctattgttcctaggctacaaacctatacagcatgttactgtactgaatattctcagcaattataacacaatggtaattatttatgtatctaaacatagacaaggtacaataaaaatatggtattgtaatcttatgggacgactatcacatatgcagtctgtcattgaccaaaacatcattatacagcacaagactatagttgaaaattttaaattatatatatgggttgcattgtatttctgtttgccgcattgatatatacatttaatggtttgtatgtttgtacttgcattcatatacattaaactgttacagggagcatatttgcttgtgttaaaaaataaataatatttatttctaatgacttataaaattattatggttatgtttaaagaggcttgaagaggtattatggttatgtttgaagaggcgacagaaacatcacctttgtcattgaccaaaacatcattgtgtggctcatgactgtaatagtgtaaagtaaagattaactgtattggctaatcaatgtggacatatcattcagtattactaaagattctccatccaatgaagcctgaacacctgtaaatgcttggtgatggatggaaagggcaattatttgcagctggactgtctgagacatgtcatcattattgcataatatttatttaacgaaggatcaatgcaccgtacagctccagtttgagggcacacttgacattgtagtttgtagatcttttataaactgactgctatcactgaagttttgctgaagaataaagacaaaagattctctctttaggaaattgtgcactttaaagactcagaaacctgaaacctcacagaatcataatagatgtatttttcagagacaatttctgagtccttggcgtattctcaaatgtcattcatgtcttcactgccgcaggttatctttttatttttatgtgtcatggaaaagcagcctttttctttttttctctcttactatgccttaataaatagaatttaaaaccccaaatctgaattattgtgaaagccaatatttgtagcaaatccatctatgctctgtgttgtcagcacatatggttttgtgcacctgctaccatgaaattctgccagggttatcctcagagaaatggagagacacctgatgccatccttactgtgacagacgtttttctttctgtgaattccaaaaatttttgaagttatgcatctcttgcagtgaacttcagtgacttgtgtacacatggtatcttcctttctagattgtaagttctttgagggcagggactgattctttctcatctttatatgctctgcttctccactcttggtttagccagagccttacacaaagtagaagcttaaataatgtttattagatgaatatcatactgagttccagaaattacctgagagcaattgaagaaggaaagtgtggagggagaggtgttagcatagagttcatagtgtctgagtttggcatccttttcctcaacacgaatactaacacagataagtaacctaactgtcttctcaaatctgagaggagtagatgcattttctcttttaggacttttctatctcatgtgggaaaagcaaacaagaaggtcctacaaaagtcttgtaggtatttattcttatccgacagtggtggatgtgacaaactctcttattggtttcagttggtcccacaggttatgtgatgaggactttggggtttggggagctgggaaccatgagttgtctcttatggatgacctaacatactgctaatacctgacaagcttcaatttatccatctcgaaatggagatactaacatctgtctcaaagggtcattgtgaggagcaagtaggaacatagaaaatttcctagcacaaagtagatatggaagatagggagtaagatgttaggtattttattgcttctactgcttctgctgctgttactactactgctattattattactactcctggaagagtaggacttcctgggacactgaccctacttaccccttcaccttattcaccaaaacttatctcctatataaattcatttatatttttctggaatgataagaaaaatccttcatctaggtagcatattttatatttgaatagtttatgtttcaaataaataaagtttttacaaaccccagagaaggcctatacagccaaatttgaaaaaaaaatttaaaaataaatattcagtgtttcagatgtgtgtgtgtgtatcttttaattgccatgtatttctaccaaaaaatacaaaacttaattttgtatcctgaaagaccctcatttgagaatccctgcttttatgttctgccatgaccactttagtccaggcaacagatagcttaggttgttgctttacaagtggagaaacagggctgagaggctcgccatactccaaattaccagtgccagtcccatggcacaaagacatgaaaggcaggcacccaaacagaaaggtagtgcaattaattgcttcaaagtcttcactcagggctgcccttaggcatgatcagataaaaatgtacacattgcttggcacctggtaaaatgttgtttcctttccttcctccttcccctgatagactcttcttaggtacagaaaagatgaggctgcacacatagctaaaagctatgccattaaaacaaacttcttttttttttttaatttatttattattattatactttaagttgtagggtacatgtgcataacgtgcaggtttgttacatatgtatacttgtgccatgttggtgtgctgcacccatcaactcgtcatttacatcaggtataactcccaatgcaatccctcccccctcccccctccccatgataggccccggtgtgtgatgttccccttcctgagtccaagcgatctcattgttcagttcccacctatgagtgagaacatgcggtgtttggttttctgttcttgtgatagtttgctaagaatgatggtttccagctgcatccatgtccctacaaaagacacaaactcatcctttttgatggctgcatagtattccatggtgtatatgtgccacattttcttaatccaatctgtcactgatggacatttgggttgattccaagtctttgctattgtgaatagtgctgcaataaacatacgtgtgcatgtgtctttatagcagcataatttataatcctttgggtatatacccagtaatgggatggctgggtcatatggtacatctagttctagatccttgaggaatcgccatactgttttccataatgggaatttccataatgggattccataactagtttacaatcccaccaacagtgtaaaagcgttcctatttctccacatcctctccagcacctgttgtttcctgactttttaatgatcgccattctaactggtgtgagatggtatctcattgtggttttgatttgcatttctctgatggccagtgatgatgagcattttttcatgtgtctgttggctgtatgaatgtcttcttttgagaaatgtctgttcatatcctttgcccactttttgatggggttgtttttttcttgtaaatttgtttgagttctttgtaggttctggatattagccctttgtcagatgagtagattgcaacaattttctcccattctgtaggttgcctgttcactctgatgnnnnnnnnnnnnnnnnnnnnnnnnnnnnnnnnnnnnnnnnnnnnnnnnnnnnnnnnnnnnnnnnnnnnnnnnnnnnnnnnnnnnnnnnnnnnnnnnnnnnnnnnnnnnnnnnnnnnnnnnnnnnnnnnnnnnnnnnnnnnnnnnnnnnnnnnnnnnnnnnnnnnnnnnnnnnnnnnnnnnnnnnnnnnnnnnnnnnnnnnnnnnnnnnnnnnnnnnnnnnnnnnnnnnnnnnnnnnnnnnnnnnnnnnnnnnnnnnnnnnnnnnnnnnnnnnnnnnnnnnnnnnnnnnnnnnnnnnnnnnnnnnnnnnnnnnnnnnnnnnnnnnnnnnnnnnnnnnnnnnnnnnnnnnnnnnnnnnnnnnnnnnnnnnnnnnnnnnnnnnnnnnnnnnnnnnnnnnnnnnnnnnnnnnnnnnnnnnnnnnnnnnnnnnnnnnnnnnnnnnnnnnnnnnnnnnnnnnnnnnnnnnnnnnnnnnnnnnnnnnnnnnnnnnnnnnnnnnnnnnnnnnnnnnnnnnnnnnnnnnnnnnnnnnnnnnnnnnnnnnnnnnnnnnnnnnnnnnnnnnnnnnnnnnnnnnnnnnnnnnnnnnnnnnnnnnnnnnnnnnnnnnnnnnnnnnnnnnnnnnnnnnnnnnnnntgagcagtggtttgtagttctccttgaagaggtcctttacatcccttgtaagttggattcctaggtattttattctctttgaagcaattgtgaatggaagttcattcctgatttggctctctctttgtctgttactggtgtataggaatgcttgtgatttttgcacattaattttgtatcctgagactttgctgaagttgcttatcagcttaaggagattttgggctgagacaatggggttttctaaatagacaatcatgtcatctgcaaacagggacaatttgacttcttcttttcctaactgaatacccttgatttctttctcttgcctaattgccctagccagaacttccaacactatgttgaataggagtggtgagagagggcatccctgtcttgtgccagttttcaaagggaatttttccagtttttgcccattcagtatgatattggctgtgggtttgtcataaatagctcttattattttgaggtacattccatcaatagcgaatttattgagcgtttttagcatgaagggctgttgaattttgtcaaaagccttttctgcatctattgagagaatcatgtggttcttgtctttggttctgtttatatgctggattatgtttattgatttgcgaatgttgaaccagccttgcatcccagggatgaagcccacttgatcatggtggataagctttttgatgtgttgctgaatccggttttccagtattttattgaggatttttgcatcgatgttcatcagggatattggtctaaaattctctttttttgttgtgtctctgccaggctttggtatcaggatgatgttggcctcataaaatgagttagggaggattccctctttttctattgattcgaatagtttcagaaggaatggtaccagctcctccttgtacctctggtagaattcagctgtgaatccatctggtcctggactttttttggttggtaggctattaattattgcctcaatttcagagcctgctattggtctattcagggattcaacttcttcctggtttagtcttggaagagtgtaagtgtccaggaaattatccatttcttctagattttccagtttatttgcatagaggtgtttatagtattctctgacggttgtttgtatttctgtggggtcggtggtgatatcccctttatcatttttaattgcgtcgatttgattcttctctcttttcttctttattagtcttgctagtggtctgtcaattttgttgatcttttcaaaaaaccaactcctggattcattgattttttggagggttttttgtgtctctatctccttcagttctgctctgatcttagttatttcttgccttctgctagctttcgaatgtgtttgctcttgcttctctagttcttttaattgcgatgttagagtgtcaattttagatctttcctgctttctcttgtgggcatttagtgctataaatttccctctacacactgctttaaatgtgtcccagagattctggtatgttgtatctttgttctcattggtttcaaagaacatctttatttctgccttcatttcgttatgtacccagtagtcattcaggagcaggttgttcagtttccatgtagttgagcagttttgattgagtttcttagtcctgggttctagtttgattgcactgtggtctgagagacagtttgttataatttctgttcttgtacatttgctgaggagtgatttacttccaattacgtggtcgattttggagtaagtacgatgtggtgctgagaagaatgtatattctgttgatttggggtggagagttctatagatgtctattaggtctgcttgctgcagagatgagttcaattcctggatatccttgttaactttctgtctcgttgatctgtctaatgttgacagtggagtgttgaagtctcccattattattgtatgggagtctaagtctctttgtaagtctctaaggacttgctttatgaatctgggtgctcctgtattgggtgcatatatatttaggatagttagctcttcctgttgaattgatccctttaccattatgtaatggccttctttgtctcttttgatctttgatggtttaaagtctgttttatcagagactagtattgcaacccccgctttttttgttctccattttcttggtaaatcttcctccatccctttattttgagcctatgtatgtctctgcgtgtgagatgggtctcctgaatacagcagactgatgggtcttgactctttatccagtttgccagtctgtgtcttttaattggagcatttagtccatttacatttaaagttaagattgttatgtgtgaacttgatcctgccattatattaactggttattttgctcgttagttgatgcagtttcttcctagcctcgatggtctttacattttggcatgtttttgcaatggctggtaccggttgttcctttccatgtttagtgcttccttcagggtctcttgtaaggcaggcctagtggtgacaaaatctctaagcatttgcttatctgtaaaggattttatttctccttcacttatgaaacttagtttggctggatatgaaattctgggtttaaaattcttttctttaagaatgttgaatattggcccccactctcttctggcttggagagtttctgccgagagatctgctgttagtctgatgggcttccctttgtgggtaacccgacctttctctctggctgcccttaagattttttccttcatttcaactttggtgaatctggcaattatgtgtcttggagttgctcttctcgaggggtatctttgtggcgttctctgtatttcctggatttgaatgttggcctgccctactaggttggggaagttctcctggatgatatcctgaagagtgttttccaacttggttccattttccccctcactttcaggcaccccaatcagacgtagatttggtctttttacataatcccatacttcttgcaggctttgttcatttctttttcttcttttttcttttggtttctcttctcgcttcatttcattcatttgatcctcaatcgctgatactctttcttccagttgatcgagtcggttactgaagcttgtgcatttgtcacgtatttctcgtgtcatggttttcatctctttcatttcgtttatgaccttctctgcattaattactctagccatcaattcttccacctttttttcaagatttttagtttctttacgctgggtacgtaattcctcctttagctctgagaaatttgatggactgaagccttcttctctcatctcgtcaaagtcattctccgtccagctttgatccgttgctggcaatgagctgcgctcctttgccgggggagatgcgctcttattttttgaatttccagcttttctgccctgctttttccccatctttgtggttttatctgcctctggtctttgatgatggtgatgtactgatggggttttggtgtaggtgtccttcctgtttgatagttttccttctaacagtcaggaccctcagctgtaggtctgttggagattgcttgaggtccactccagaccctgtttgcctgggtatcagcagcagaggctgcagaagatagaatatttctgaacagcgagtgtacctgtctgattcttgctttggaagcttcctctcaggggtgtactccaccctgtgaggtgtggggtgtcagactgcccctagtgggggatgtctcccagttaggctactcaggggtcggagacccacttgagcagggagtctgtcccttctcagatctcaacctccgtgttgggagatccactgctctcttcaaagctgtcagacagagtcgtttgcgtctgcagaggcttctactatgtttgttattgtttactgtgccctgtccccagaggtggagtctacagagacaggcaggtttccttgagctgctgtgagctccacccagttcgagcttcccagcagctttgtttacctacttaagcctcagcaatggcgggcgcccctcccccagcctcgctgctgccttgccggtagatcacagactgctgtgctagcaatgagggaggctccctgggcgtgggaccctcccggccaggtgtgggatatgatctcctggtgtgcctgtttgcttaaagcgcagtattggggtgggagttacccgcttttccaggtgttgtgtgtctcagttcccctggctaggaaaagggattcccttcccccttgcgcttcccaggtgaggcaatgcctcgccctgcttcagctctcgctggtcgggctgcagcagctgaccagcaccgatcttccggcactccccagtgagatgaacccagtacctcagttgaaaatgcagaaatcaccggtcttctgtgtggctcgcgctgggagttggagactggagctgttcctatttggccatcttgctccgcccccaacttctttttcaaagagcaccttcaccccttactggactaaagtcaatccgaagctcttttctctaagctttataacacttactgcctggatgagtcatttgtcaataatacagactatttgtattggtgggtttcttgtatatatgtacgagcccctagagtctctaacttaaaatttatttttgctttagaagttcaggattaaggaggctatgatgatcaattttaacaacctcaataaataatacagtaactaatggttaggtatccaggctagcccagggcagcctgtgtgattcatgctgctggtgaactgtggctggctgggtaaactagatctgaaattctgtggtgcctaagggagggaagggaatatttcccacactatctcatcctgccctcactatccctacccgcaatctctctctacactctaccccacctaccctgctttttctgtgaaagaccagctggggcaaatattttggattaagtaaaatttgtcttgggtaacttcccaaaaatttagtttttaactgaataatcttggttaatccatgagtaaataaccttgtagactatagtcagcctcactgtgagaagctgacaaattagaacaccagaggaatatacaccaattccttcctgccctgcaaacctctgcttcttgaggtttattaagagtgggtgcctcggccgggcgcggtggctcaagcctgtaatcccagcactttgggaggccgagacgggcggatcacgaggtcaggagatcgagaccatcctggttaacacggtgaaaccccgtctctactaaaaaaaaaatacaaaaaactagccggccgaggtggcggacgcctgtagtcccagctactcgagaggcggaggcaggagaatggcgtgaacccaggaggcggagcttgcagtgagctgagatccggccactgcactccagcctgggtgacagcgcgagactccgtctcaaaaaaaaaaaaaaaaaagagtgggtgcctcattgattagtcattagttattgacagaaccagagagatatgcctggctcctcttggaaaaaaccaaaagactgaaagggaaaagtacatcagaaagatacccaaggaggcagactgctataaggaaaataattaggagaagaaatcatatgttttcagatgaatagaatctggggatgaaaaaagcagccttttcaggcagatgatggaaagatagaaactaaattcagaaggattagaagatgattagaaggacaagaagccacagaagaccaagatttctcaaattaccaaaagaaggtaagcctagccttgttcagtctgcagaatgagaactcccttctagtagatccgtacaatgaatttcacaaaggttgatttccctctctcctctttgagcccataatcacctccttctacgtgcacaaccttgaccatcaccactacctataacaaataaccagttcttatgatcccctcaaggcataacacaaaaatattttctttgtgattactttctctacacaaaagagagagagagagagagagagagagagagagacagagacagagacacaagtcaggggacttcgttggtgagtttagaccacagcaagaacctaaaatcctagtgggttgtcaatatagacaggctgaaaccactaagatcctgagtggtggttctaggtaggtatgcccatcagaaccatctgtggataagtattctcagtaaatacacatgcaggacctctacctcagatgtactgaattgaacttcactgctggagctcaggcatttcatatttgtttcctaagctgctataacaaagtaccacaaacttgatggcttaacaagagaaatgtattctgtcacagttctggaggccagaagtccaaagtcaaggtatgaccaggactggttccttctggaggctctgaggaaaatctgttccacacctctctcctaggttttggtgactgccagcaatctttggtgttctttgatttgcagaaacatcattccaatctctggttctgtcttcatttgactttccctatgtctgtgattggtctcctttctgtctcttataaggacacctgtcactgaatgtagagcctatcctaatgcacaaggagctcaattataccttaactatatctgtaaagaccctttttccaactaaagccatattcacaggtaccaaggtttaggacttggatatacctttggaggatacagttcaacccattatacatatgtattgaagggaaaaattcacaccacaactgattctcctgtaaagaatgttggccttaatgcatttaacacaccatttctccagcacttaggaaatgctaggacatgcaaagctaaagctaaataggcttctttattgcagaacctctcagaggctctcatctgtttgtgtgcattataaatgtccaagagaaaaaaaagaaccataacatttcctggaaatagtcgaccagggaacgtcttttcaagggattacctattaactacctcaatggacactaatgactaaaggaatacaggctgctggtgattatggcacttccaaagtatgctcaatggtgtgggcatgagtctaccacagtgtataaacacttagagtgttaatgtctacactgacctctccctggatatgagcacacatccttcatcaaatatccacagtggtttccctagaggatttgcatatgcgcatggaattttagatgtctagtctctactcttgccttcagccatttttgtagagagaaattggcaaaatattagcatgcatggaagggaaaggtggccaagataatacattatgcctttttttccccctgaaaattgcccagaatatctgaaaagggagaagtggcttaatcatttctattcccacaattctgatcctacaaaattgatatcagtatatgattcatccagaagttcacagtggtatttttttaaaaaacacttttagaggttaccagggcatctcactgttttaaaatttaatacctcaagggaagtaagcaactaccttgaatttttgcatgaattgcattcaagaataactgaatagttcgtggaataaagttgattttttaaaagtaggcatattctagttaataaatgtaaaagaaatggtaggattacaaaatcactacattacaaactctaatgacataatagatttaagcaaaatgatcagtgaatgataaaatatttaggtatgctctcttccaggtgaatcaagctgacaataccttggacccacattagtcttaccacatgatattatatgtctcctgatacttaaaataaatatcaaataaatgttgataattgttgaaacttggtgatgaacatatagttcacagcaccacccgtgatggattctttccatgagaattgatctgaatcaaagcaagcctctcggtctaactgccagtgtataggaaataaggatacagtaacatttttaaagtctttaagaatgcagtaagctgaaagaaattggtttctgcaataacagcaacaaaattatgtaataaaaagagagagggagaatcatggatttatacaaacttaagagacgttgtgttaatctaatgtgtatcctgatcaaacaaattaactgtcaaaagatgtcttttgagatatgttaggaaatttgaacataaactaggtattctatgatattcaggaatcatcgctaatttgttagatacgacgttggtatgatttttttgaatgagaaagtttttagcatcactaatttgttagatacaatgttggtatgatttttttaaatgagaaagtttttagcttttagagacacatacctagatagttatggatgaaagcatgtgatttaaaaaaaaaaaaaagatagtggaagtacacagaacaggattgctaaatgttgataattgttgaaccttgatgatgaacatataggaattaattaaaccatattttctatttttttgtttattttgcaaattcaaaaataaaaatagaataatccctcatgaacagatggcctcaactttcatccccaagtaaacacaattcacattctcagtggaacccatgagaatattatgaagtatatgtctatctcatttcattatatatggaatcttaccattccctttgtctttattactagtggccagagttctatcttgaaatgtgggaaatgtcctatatgaacaaattagtttaattactgtgagaaaaccagaaaatatttgagttctagctaactggatattgaatgagttgtgctgaagtatgtggtcctgaagggttgataatgaaatatttgctttccagtggcaaggaaaaataaatgtcttagctagaatttacaaggtcattcttgaaatcaatcaacctgggctgaagatttcattgctgctgttatctggcatgatggtattgtttgtgcacagttctgttgatgtgagctatcaaatatttcttagaactgaaatcatataatagcaaacactgctatgtcccaatggagattccaagactcttttaccatggaacatttacattctatcccctttcatcactgctgaacaaacaaaaacaaaaaaaggaaagataaccaataagctttttatttaattgaaaaccaaagagagagagaggaaagaaccagttagttgccattttctaaatgcagacttttgtttctttctgccttccaattctttgctcttgaagctatagctttcaagcttgtgtataaaggcccagagagaacatttgaaatgtggccaccctacccatgtccatgccactcttcctgcctttctctctgcctacttctgctccaccatcccaggtcaggggctgggaggctgatagcattacaagtagtatagtcattcaagctcatataaacaagatgaaatccaaataataacaaaaagtattttatttcaagtactactcagttccttcagttttgctgaccgatttctaggagacctaggctcagctcttggttgtctcagaactgaggacagtactcatttgcaccatatgcatctgcttgttagcctatgcaaccaaaattgattcattacttggccttctctgaaaagaaaaatgaaaaaaaatgcactcttaaaaataattcttaaaatacaaccaggaggcatgtgcctagacatggctcaccttccaccaaatcatactttatgatttcccacaatgttaccttctattcctcctgcccctaaggttctatggagcagagcaggttgaagaatgttaaggttgtactaaactttttagaatagaggctttggggaagcaaatgagaggtacactgaaaatgaagtatctgtctctgctcctattaatgtcacaggactagaagttgacctcatagctgattagagatggaccctgcaaattgaaccccagcacatgcctctcattatccattcttctctttgcagaatggggtccatgctcacatatcaagaaaatggtgggtttcagtctggctcactgggtgaggttttggcatgcaaactaataagagttagtgtacatcacccataataaaagtaaaagctttatttttatttccccaggtaaataagcaaaagacagatctaaaatacattagagttaagttccatggggacagaaatgtctgctttgtttgttgttgtatatttgacacctagaatggtggctggaccatagtgactacaaataaaatatttcctaagggaatgaatggttctgcaggatagatgttctctgcatttggataagtgatgatactatagactcagagcctagatagaaaatattgtcccactttcagttctgcaagttgacttgaggtgcttggcgatgtcctgcagcaagcaaacccaatgaaggcatctctgagaccccgtagtcaccaccgctagcctcccattaccttgcccaccctagattttcaaattgggaatcattgtggtaccagattgggaatatttgacttgcatactttctcatattggggcttaggattttgagatcttacttccttttttggcttcttgagatctgaaattgttgttcagagaagcgtattaagacaatgattcttccattaccatgcatttctgttaccaacagaggaggtaagtgaatcacttaaaatgatacaattccatccacttcagtacgctataaacatatccttagctttgactataattatagtatgtgggtgatgctgctgagaaaatggtataattataacattatggttgagaattgtctgagtagaaagcactgagctgtactatgcaaagtttaaggcagcattatgggtcccttttcaatatgaataaaattgattagccaattgcaactgagagctttgtaaaatgatattaataatataaaaatcagctgggcgtagtggctcacgcctgtaatcccagcactttgggaggccgaggtggtggatcacaaggtcagaaaatcgagaccatcctggctaacacagtgaaacccgtctctactaaaaatacaaaaaattagctagctgagtgtagtggcgggcgcctgtagtcccagctacttgggggctgaggcaggagaatgccgtaaacccgggaggtggagcttgcagtgagctgagatcatgccactgccctccagcctgggtgacagagccagactgcagtctcaaaaaaaaaaaaaaaaaaaaaaaaaaaaaaaaaaaaaaaaaaaaaaaaaaattcaggggccaaggtaaaaatttaggaaaaatttgatacttttaatttcttttacttataggagtcttgtatgcaaccctaatgcaaagtaaagaagctcaccaacttgaaggaagcatgaatgaaattacaaggaaaagctagcttaaaaaaatcaaccctgttacttggtttttcccctctttgctcttggcaaaaggatcttacatatgtataccaaatgtctatttgaaaattttgtttccctgaatatagatttcttttctctttaacagactgatccaatggttgtagattttatgctaccataaattaaagaagacagcattctatatcatgactgaggtgttaatgacattatgcagttgtcacattttgaaatataaacttaaatgtgagcttttcactgtgtgtaaagtttatctgtattaaaattttttttttaaataccagagatttcagcaacaagaaacataaagaagtaaaaagtacatagaaaccctgtcctagaggacctgttccgccacttaaaagccatgtacctcttgaagcctgtttcctttatttccaaaatgggaatttttatatttacaccctaaccatcacgtgggtcacatgtgataacaatgtgcaagtttcttacaagtgttctagaaatctgtaagtcttagagttctgaggtttactcccaaagaagtggaaattgtgggttgcaccaaacagttaaacagggtgacagggaacccctgtcacgtacccaggcctttgggttattttctagggtgagggaacatggccagtagtacaaagcatgtgagtgtgtggatgtgggtatctgcagtggatgagtgggtgtgtatgtttatgtacaacacatgtgttggaggataaaagggaaaataatttgtctttgtgacttcatctctattcctggcttggaatgttattcctctctacacaaagcatcaaaacagaaaccccttcccttctttattatatcggaaatctggaaattcagttatccttgtcttatcctactccctgctctgttctaaatatataataataataataataagtaatagcactagtagtagtagtcgtcgtcatcgtagtagtagtagtggtcgtagtagtagtagtaagagaatgaagagatggaggagaagaattggaaatagggaggtttcctgtacctgactggcagtttatatagcaaccgcctgcagatttaggtcgtttcttacttcgcttattttacagcaacctcaaccaactgtgacaacctgcaatatctttagcccttaagatactgtctcttaaacctgaccaatatttcttatttctcaaagagtaatgacaatcttttctgtctgagaacttctaaagccacaattgattttcctcacatttccctcaaatgaaaggagtatttgaaaaatggaactcaaaggaggagccacctcagaagcctaactggagcagtcagactctgcatcaacagacttggcttcagttctcacactgatacttactagctgtgggatttttggacaagtcacttaacccctgagtctttagcttctcatctgtaaacaagtataaatactacctacttcataagctcgtatgaaaattcccacaaagtatgatgttagtttcctttctttttgtgctcagctctaaaaatatgcagtgtagtaagtcatcaatatttcattaacataagggaaaactatatacccaacccaaaagctgagattcttcagaacattttttttaaagagattctaattgggaattttataaatggaatacagagtactttttaaataataataacaatgattaatttaaagttactaaacaaaataccttaatgaatttgggaaaaaataagctaaagataaatattaagcaaaagagaaaattattaaagtaataatgtacaagtcacttgatacttgcaaagtaacacagaattagacataaagccacattcaagaggcagcaaagccaaaatggctggctggccccgtttgaaaggctcttggcaacagacatacggaaaactctcatctctttcctgggccttacttcctactctggataagcagcatctttcacacaaaagaacatatccagaataactaagaaagagatgaaatgatttatcggaactagttaaaataattaaatcttaaaagcatgttcccctggacatagagtggggtgatttctgcaaagattttgaaaataaagtacccctaaaacaaggatttggtttaactgcttgaaaacaatgtgacaggttgagaaaactgaaaattttcttaaaatcttgtttacttgaatggtgagccagccatccaggggagaaaccagagctctttccttaaagaaatacagacttccgttggaagaaaaaagttggtaggttttaaccttcaaccttctagtgaagtgagaatattgattgagcatctattactagaataaatttatcttaagtgacccagggaagggtcatgggtgataggaactgtcagagagaaaaaaaatacatggttgtggatcttaagtacttacaatctactgagggctcttgtctgcattttccttagatcgtgatgttgctcaaagtcacataagaaagcacataaatttactgaataatattaagaaagcagcagtgacactgaaatgcttgcattctgttcactatcccagtcatctgcagttgcctgggggatttgcaagcaaggacaggaaaatgctagtaccaaccagttctagataatgaatttatttgctgcaaaaactttcactgtattaaattaaattagattgactggaattaaaaggtaataaggcccattttcttatgtaggtcatcaattactttaactctaaagataattccaaaagaagaggtttaaaaatcgtttgagtagtagtaacatcattggaatttatttgaaacttcccaatgtgctcacttttacagataacatatgtatatatatatttttatatatatatatgtatatgactgctggcataatgattaaaatgatcagttttattactttgtaatcacatcaagtaacaccgatgattgaaataaaatctgttagatgagtgaatgcaatgataatgtatagcagatgaaagtctttgctatgaagcacatgattgttgtaattgttgctgctcttttgggatcctgaaccagattccccaaataagtaggtaacacggcatttgtcttgagcactttttcaagcattgtaatccatgcattgaagtagacattatcagcctacagctgtaaactctaagatgattttaaagtctgaaggtttataggtcttcattaggataagctgggctcaccatataaatccttgaggactttgctagaaaaatagtggaattattgaatagggaaaagagataatggtaatgggatttgcctgatgtcttcatcctagaaaaaaagatttctgcttgggcattaagaatgatgattctggaagactttcaggaatgttgataaggcttgagttactcaggatttgatgccaaagaagccacactgcacatgtgttcctctaaggtgtacttggttctcacctgagaggcaaaggctctacttattttttgattgtttggtcctaagttaccttcaaactccacttaaccgcatctctaatcctgcgtattgcctttccagcatcttgtaaattccaaggggttgggggaacctctaggttccaaggctaagctaagttataaatgaataccctgtgcagtgttgagaatgaaacagaagctttggcgcatggtagcccactatgaatgcggtttcagaggagcagtccaggcgccctcaatgaataggcatatatgggccaagagacaggcctctcagccataccacagtatactggaacaatgagaaatgggagaggacatacttcttacagtgacacactgacctgttttcattctgtcctctctctgcttctccatttccacttattgcctgtattgcatctgtccagtaactgtttctttaacagttttccagactgacattattaatccagaagatggatggtagtttttttgttgttgttgttgtttgtttgttttgttttgtgatggagtctcgctctgtcacccaggctggagtgcagtggccagatctcagcttactggaagctccgcctcccggtttcacgccattctcctgcctcagcctcccgaatagctgggactaccggcgcccgccacctcgcccggctagttttttgtattttttagtagagacggggtttcaccttgttagccaggatggtctcgatctcctgacctcgtgatccgcccgtctcggcctcccaaagtgctgggattacaggcggtagttttttaattaaaagggaaagctgattttatttggtgagacttctgctatcatcttccgtgttatatcccaatatgagtatttttttaaatgttctactaaatccaatagtacattcacctcactcttgagttaaactcttgactttaaaaaaattagccagaaaaaaaaatcataagaaaaaatgcagcattttaaattctataaatgagctatgtcttaaactatttgggagcataactcaattgtattcattttagtttaagatcatgcaaaaagggaaaggtatagatgctattttattgatatgctgctccacagatttcaaattcaacatcataagccaagatttgtgggaccagaggaatgttcaaaagtataatctgataaattatctgttgcagaaattaagtaaaatattgcatacatctcacttcctataccaaatagatagaatgaaagtactagattttgtatcacagatagtttagacaactacagggaattctgaactttcaaacttttatatcctaaactcaagatttgggccttgaaatataaaactgacaaaactgctacagtgtggatttttaaaattacagttttcctgtggtagagttgacactttctgttggtatggctagaagtcagatagatgcttaatgttaaagaccatgtttttatttcttctctttttctcaccctatgatttcattgacctaaagtggcttttagtgctgttcaattcacacagaagccaaaattggttactgcgttaagaagaaaccaagaggttttatttagttcatgaaacattagcaaaacttctgtttgatgcaaaactgcaaggaagttttgtagtcattgaaaggagcaagaatatacagattgcttgcagttccagtgtagagacattcattatcagatttaccacttgaaaagattatcaagatagtatttttattgtgtttaccaggtaaactaagaactttagttctaagcactttacctattttaaatcattaatagtgctgtaacaagcctctgaggtaggtactgttatccctctttaacagataaagagaatgaggcacaaggaagagaagtgacttgctaaaagcacacacagctgaatgtggaccctgattcaaatctacacatcctgactcaagcatcgttgctctgtattactgtgctacagtgcctcttcacatcctcctgatgcagaaatcttcttctagaataatgagaagcagtgtgagctttgaagtaggacttcctgagcatggtgctttccatcatctctgggccaaagttttctcatctttacaaagggattatgatcaacccccatctcatactgtggttaggagaactgaaaaagaccattatactaaaagatgtcagaacagggcctgacagatcatagggcccaataaacatgagctcttgttatcatcataaatatgttaaaagcagccttagtatatggataatagtagcagaatttcctgaatgagacatgttaaacatttattaagtgggcgctttttagagtttatcctataataattcagtaaggttactcttgtcatccccatttcactgaatttgaggaatctcaggctacaagataacatattagttttctagaatcaaataagcaaggattcaaactcaggatgtattgatcccaaaacctcagatatttctgccgtccctgtcttgttctaaaccccaggtttgctcatccaggccctagttattgatcaaaaagcaccaatagaaatcagagtagagaaagtcatattgagcttgtgagattgcattatgggcgtggtaacaaatgtcattcagatgttttggcacagtgcataacaaccatacttaacctctgtactaagacctgtctgagcccataaataaagttacattaataattatggaatgataagggaccactcagaaaatcttggttgatataggaagtggcgtctgtggcttctaattaagagatattgcttcttgaatcagttcctgaccattgctctagggggatattaagccttctctgtccatgggagatgtgaaattcaacagctgacctgactgcttgtcgctgttgatgatcctataaaatttcttctaagataagaactctgtgttctagtccaaatcaagtgaatatttcctgtttgttgacctacagcttcaagggtatgaggtcataagtttaaaaagatttcttttctctccattgttgtgagagtcattatagttctatcaaatgctccaagtgaatcctgcatatttcctttttgccagatatgttagctattcactctattttcctatctcctctatgcttttactttttccctcatctgtttaccaatggtaccctgaattttagaaccagacaggtagtaggacaaggcaggtgaaactacacaggttgtaaatttcagaatgcaggttcaaatttcatcgttgtctcttgctaactgaatgaatataggtaagatgttttacctctcagagtcttacataccccatctgtaaaatgggaataatactgtcttccatggttttcttgagcattaaatgtctctatttatggaacacagtttcatgtagtaactgattctgtaccaatgccctgcctcctatgtaggcaaatgcatgtcccaaaagacccaaaacaagttgtccctcttttcaagatgaagctttgtaatctctccttaaatttatccagttctggtgtttaatttcctttataagccagaagttgtcttacgtctcaccaaatcttataacatgaatataatactgtcttccaaatgtgagcctctaattaccttaggccaatagcagagcctctgatcttatcttttctccttttccgcttaccagacagcacattctgctgagagttgggacccaaaaagatataaatcaactagggggcagaaatggagattcctaagctcctcccagagtttgactcagtaggcctgaggttcaggggcttgatgttaaacaagcaagcccagtggttctgctgcaggtggatcagactcccaagaccacattttcctagcactggcctttaggaagagcacgtgcctactctatcagagtttgtgcagactatgattgcagcctagtttatgcagactattgattgcagcctcttggcaaggctctataaggaaaagggagccaacgtgtaagtaaattatcacggccatgaaactcctcatctgagagggtttcctctcatcccttcatccctttgtgtctgccccagaatgccagactatcttctccagatagacccaagtcaatctcttatttttaagccattcctcattctcctatatagtccaaaatagcaaatacatttttaggaattctcttgctttatgggtgttcatccaaaaatatttcattataagaataagtgcttagcttatcctgtagtgtctttctgctctgatatttgggcccttcctttccacatagttgcattttctttgatgggcagatgctgcttctttaatatttttcacaactctgtgcttctaacagagcaattatttcaggaagagggcacttggagagttgtaagaggctaaggagcccatgtctctgccttggatttgtgtacctaaatgttacctaattagataaacctgaaaaagatttggaagcaaagtagaatgaaatggaaagtgtttggataataagaatttggacattgttgctctgtggtgatgttggcagactctaagcttcttgcctcattttattcattcatgtatgaaggagttatactcagtcataagtcactaaaatttgtattctacatcccattagtaaagtatttttgaacacacatgatacatatgtttacatatttgtaagttatatatatgtacaacgttctaatatattctgttcattgtcaaacttaaatatatataaatttggtttaatataaaatataaaattagcattagtgtctgtgtgtctgtctcatttctgaaaaaagcgcaatatgtactaagttaaaggttcattcttaatagcagtaggagtagatctttatttcaaatagtctttggggtaatttcctgttttggaagacagcttatcagatttggttagagttgatgaaagcttattctagggttaagaaaagtattagctcagccattttcttattgttgatttgggcttgcataattaggtttaccttcagtatgaagtttctttacatgaatctgtttaacccacttatttgttatataattattagttaaatgaatgttaaatcagtataatctatttatccacaaaatcggtcatacagaacctgcaaaaaaaaaaaaaatgctctaacatgttacatgaagagataactaaagatactacaaacaacccctctgaacagtaacactcccactcttcctgcaaaattcctctcatagcaaatgcaacatgtgactcagacacaggctgactgaaggctttatgtgactcttacatgcccaatattagaaaaccttaatttctttcctattttttataaacaacatatataaacaaacattttagtatattctcattacccaatggatggtcttgcatggtccattttgaagacagtaaactatagcctctatttttatttaatttcaaatacctgtttgccaatattcacagccagcttttgttaatgttcttttctgtcctgtgaatcctgatgtcatatcttgcaacatccactctaaagcctatctttgcactcccgtccatcccccattctctattattgtgctgcctctgatggccagagaaaaaaatcttgaaaatacatattgtattgccctacgggtagaggaaacagcagttatacaattcaaagttgcagcaattcaccacactgtttagcaccctactaggtgtaaggaggaagcttgattttaaaaatatatgcaataatgccttcttcaagaatgtttgggagcatgcaagagcttaatgctcatggacatttactttattccagcaaatttagacccaatctgtgtgtagtttcattttgttttccatttcctgattaactgactatatatctagctacttatttgctgccatctagtgtaataaaatatgttgattatacatggaattttgagcccattatgtagttgaatatcagtactcaaaatgattctttttttctggtttcttataagtttacaaaatgcctagtcagggacctttcttatcactgtaaccctgaacgtggtcttaatattgtgtcatagtatctagggctcaggatcatgagccttccttcattttctataaacgtgacaattggaaactgggtaggggcttagcagttggtggatgtgaagtaaatatataagagtaatcattaagagatcatctcagtttagtgaccatgatttttacttcatggaggcagcaaaacacagcatggattcttaccaatagtgtgaccatgggcaatttatttctcttttggaggcatcattttcttcatatctaaaatgaagtggtaggtccaggtgactgttgaggtctcttccagctctaagagtctgtgtctacatataaatgattttctctgccaaagtaatgtttttagagtcctttataatgccagaaatgaatacggcttctctagtttttctatgtagctatctatcctttggtgtggttagaagtaaacagcgatcctgactggaaagagagggaggaaaatgtggactatgattttattccttttattcttgagagttgtccaatgggatattgtcccctagtggataagtagatacttgccaatatgcacctgacctcttcactcataatgggaatttagaagtataatacctgttataatcaacttcctaatctctatccctttttttatcactctgtttcctattgtaacttctctatgtggtactataagtctacagtaacatataggtgtttccctttccttatgaagttttatacagctactccattatatcctaaaatgttcctttttcttgcttttatagtggggtctttattgttggccaggctggcctcaaactccagagttcaagtgatcctcccacctaatagtagctgggttttcttctgagtagctggtcctaaaatgttttattttcagattatttcaggtgtataagtcttattttcccaaccaggctgaaaacttttcagaatcaagaactgtctttagtttctcattttttatgagggaatgtggcattattgcttagggaattcatgtattttgataataaagatgcttttctgtttgttcatataaattagggtaaaagaggaagtataaacctatctcaaatcaagtacaggactctataattattactggctatctaacagctcatagaagccaataagtctctgaacctaatgccaaagaaagcaaccttaccataaagagaaaatccaaataaaactaaaagaggcaatgggcagtgctacctatgggaagaaaactggcttcacatcccagctttgctacttattatctttgtgttttggctaaaaattgtctaactttcctgaagttaagtttccttctctataaaatgagggttataatactatatacagcacactacacaaaagagttgtgaagatggaatgagaaagcaaatggcaaaaacttagcacaaagtaggagctcaatcaatcatggttaaaaagaacttttatccattgttatttttgcttatatacagtaaaaattatccaagacaaatgtagtcagagcatctgcaattgagctttataaagtgaaagataattctcataccatagtggttctcatcaagggtgatttttgtcccccaggggatatttggcaatgtctagagacattttatttgtcacactggaaaagaggggagtgctactggcatctagtacatagagagtaggaatgatgataagcattctgtaatgcacaggacagcattccacaacaacaaatgatctgatccaaaataccaatagtgtggaagttgagaaaccctaccgtaaagcctagggagtccattacttctgacctaaatttgttttatgtttaagagtgcatgtggatcaaaagtagcttccattttggtaggttatgaagggagttgtctaatctggtgctttagattctaatttggggcatatttttaggctaaggcattgcaatatataaggctttctaagtttcagacattttcttggaggtcagcaaacgaaggcttgggtatctattaacccactagagtagtgtaataatggtggtggttctttattgaagactctataataatctgatttatttttcggcaactgtataagacaggtattttgctctcattttacacaagggaaagctggagcttagagaatttatgtaacattactagcaagttgcacagctgggattcaaactgaaatcctgctagcttcaaagactgtgctgtttctactgatgcatactacccctacctaccaaggctctgagattggaaagcaggatgggtgtgttttaaaggaaataaggtaggaaagttttcaaatattagaaattctgctcaagaagattaggtcaagtttcctgctgaggggcccttgagtatccatgaactcgatgaaaactatgagcttctcaggaaggtagaccaaagggaaaggattactccatcctcacgctgtcataaggacatacacaagactgggtaatttgtaaagaaaaagaggtttaatggactcacagttccacatggctggtgaggcctcacaatcatggtagaaggtgaaggaggagcaaaggcatgtcttacatggtggcagcgaagaaagcatgtgcaagggaactgccctttataaaaccatcagatctcatgagacttattcactatcatgagaacagcacaagaaaaacctgcccccatgattcaattacctcccaccagctccctcccacaacacatggggattatgggaggtacaattcaagatgtgactttgtatggggacacagccaaaccatatcaccatgatatacaatttgccaattcagcaacagattttaagtcttatatttttaagcatgatgcaatatattttatgaattcttcctatttatatgttttccttttaaataggttctactatcttaactatcactttcaaatataatgcaagctacatatgccattttaaattttttagtagttacatttaaaaagtaagagggtgaaattaattttaacaatataggttatttatcccaatatatccaaactattatcattttgacatgtagtgaagctcataaaagcattttattattatgagatatttcttacattattttttcctaatacatcttcagaatctgggtacgcattttaactttccagcacatctcaattgggatgcaaaattttcagcaattaaagcataatgtagccctatcaaaactattaacgttgtgtttaggaaaaaaaaatatttttcactgcttttatttttaaatttgagcttaaattaattaaaattgaataaatttaaaattcagttctcagtcacactagccacatttcaagtgctcaatagctacaaaagactcatggctgccatattggacagcacagatctaagctcttattgctcagaatgtggtccccagagcagcatcaacagcatctgtgaactgatcaaaaccaccaatatttcagttcacacctactgaatctgcattttgtttaaatgttttttatatatatactttaagttctagggtacatgtgcacaacgtgcaggttgttacatatatatgcatgtgccatgttggtgtgctgcacccattaattcatcatttacattaagtatatctcctaatgctatccctcctccctaccccctccccacaataggacctggtgtgtgatgctcagaatctgcatttttacaagatccccaggtgatgcttgttcacatgaaagttttgtctctctaaatcgcagatctttccatcagagcccagaaaaagcacaagaatcaataactgtgaggaataaggaaacttgccacaggagaatggtgctagggttggtattaatgatgtgctctggtaaaaagtcataagtttcccagaaaggcaacaatggctattctattgtttgaactgacacaggtctattctagagcttggacttggctctgctcccagaatctacatcaaagaatctaacactaacttccatgactaccacaattaaggcagctgcataccccaccactatatatatttgaaattgcaactttagaactctgtaacacagccgtgagcatgtttctgctacacacaagtggatnnnnnnnnnnnnnnnnnnnnnnnnnnnnnnnnnnnnnnnnnnnnnnnnnnnnnnnnnnnnnnnnnnnnnnnnnnnnnnnnnnnnnnnnnnnnnnnnnnnnnnnnnnnnnnnnnnnnnnnnnnnnnnnnnnnnnnnnnnnnnnnnnnnnnnnnnnnnnnnnncctcactaatccttatttggtttgtttttcacagaactcagtatttgatgggcctttcaatattttcctttaaggaattcattgtactaatatgacatagaagctcattgttctaataaatggtccccaatgttggctgcacattagaatcacccggggcattttgaaaaataccaatgcccaggcatcacctcaatctaattaaattaaacctgtggaaggtattttgttaaagatccccaagtgattataatgtgcagccagagttgaaatccaccggtccaattagaaggaggccttagctagcagtcaggtgcccaagtaaatgcatctcaagctttaatgcgcatacagatagcctgggatttgttaaaatgcagattctgatccagtaggtatgggtggaaataaacccacatttgtgtacagatgtttctcttgtggtatgtggttggtgatcattctcagtatgcttccatttccggcaaactgggttgagttgatgaccctattcttactcctccatgaaacctttatctcgcccacagactcccagttctcattaatcactactttctgtgatattctgaaacagttattgtctttaattgtgttttttcattagctacttctctatctgcttatgtacataagttatttcctctactggattacaactcttcaaggtagatccacatatcatgtcatttttataattctcactatacctaaagagtgccttacacaaatgccacttgttgattaattgaaacagggaatagctgatgtgatatctcaaaaaatatccaaaggacttaaaaatgcaagatgtttttctttgttggaccaaaaaggaaagtttagacaggcaagggggtaggagatattgaggctttcaatttttatgttagcttatttcactctgggtacatatttaaattttgaaaaattattttgtaatttaatgattttaattatttgtttgaaatagggcactattgacattttggactagatcattctttattgtggctgtcatcctgtgcattgtaatatgtttcacaacatccctggcctcaacccactagatgccagtatctccctttccccctgtcttgagaaccaaaaaatgtctctagtcattgccagatgtctcctgggaaactcattcatggttgagaacccttagtttagaaaaatggaagtgtgacacagctgtcttactgcactaatatatgcctgaaaaaaataaaaattaaaaacatacacgtaagagagtgacaagttatgttctgagcaatatgtgtatatataaatattaatataaaaatgttctctgttcttgcattttggaggccatgtgcttgtagatcatatttatctttgtatttatcatcttgatcattctctttataaaaatagaggtatattgcatgcctctcagcttatgaggttacatcccaatcagcctgttgtaaatttaaaaaatcataagttagaaatatcaaacttgaaaatgcatttgataccctgataaatgcatcataaagttgaaaaatcctaagtcaaaccatcatgagccaggaattatttgtatatgaaacatttttaaaatctgaacatagacttgggaattttaatatgtagtggtagtaattccaccaagcaagagaatgtacatggagcaaaaattattaagaaacagtgactgagattattctcattctcaggaaactggcccagccccttttcataaaatattctgttcagtgtgctgtgatccttggactgaatatactgtttcagtaagcatattgttcagtaagcatattgttcagtaagcatatttagcttaagcagttgttaagctaaagcctgcacaccaacaggtgttcaatgactgtttgttgaataaatgaagaatgaatgaatattaactgcatctctaaaccctaaaattaaaaagctttagtgtgctcttcacaaaagaccctattttgttgcgtttgaaacttcaagcttcagaaatgaaattacatgcaagagtatattatcatcaatgagaataaatggcctcaacaaaattacaagatagaaaacaaagtttcattggtcagttggtttcttctgacaatagaaggctccccttagacttcattagcttcagatatttcaatgacagaaacataatgttggcaaagcattgctatactttcaggcttggattggaatgccccacatttactttttcctaccattcctggctaaaaacttgacatatgagaaccagacacaaggctctagtggtagcaagcagaatgtcttctaagctccaaaggaaaaaaatgatataagtcagtggttcccaaattaaccatcaaatgctaaccattaaaatcactggggaacttttaaaaatcaaatggccaactaacaacaaactgtctgaaaaagaaatttagaaaaccatcccatttttaaaagcatcaaaaaaataaaatacttaggagtaaatttaaccaaggaagggaaatatctgtttactgaaaactatgaaatgttggtgaaagaaattgaagatgataaaaataaatgaaaagataaatgtttgtggattagaagaattaatattgttaagagatctatgctatccaaagcaatctatagattaaatgcaatcctatcaaaattccaatgtcattctttatagaagtagaataaaatcataaaattcacgtggaaccacaaaagaccctgaatagctaaagaaatcttgaccaaaaagaacaatgctggaagtattgcattatcagatttcaaaatatattacaaagctacagtattcaaaatagcatgctacttgcataaaaacagacctaacaactactgaaacagaatagtgagcccagaaataaacccacacatctatgatcaattgattttcaacaaaggtaccaagaacacacaaaggggaaagacagtgtcttcaataaatggtgctgagaaaactggatatccacatgctgaagaatgaaattagacccttatctcatcctttatacaagaaccaactcaaaatggattaaagacttaaacataagccctgaaactataaaattactgaagaaaatacaggggaaaagctccatgatattagactgggcagaagtttcatggatatgacctcaaaagcacaggcaaccaaagaaaaaaatagacaaatgacattgcatcagactaaaaaacttctgggcagcagatgaaacaactaatagagtgaagagacaacctacagattaggagaaaatatttgcaaatcacatattaggtaaggagttaatattccaaaaggtacaaggaaatcaaactactcaataacaagaaagccaataaccctattaaaatataagcaacaaacttaaatagacatttctcaaaagaagtaagtatcaccctgatttaaaacctggcaaagacacaatgaaaaaacaaactacaggccaacatctctgatgaacatagacacaaaaatccttgacaaaatactaacaaactgaatacagcagcacatcaaaaagttaatttgccatgatagactagtgtgttaggttgttctagcatgctattaaaaaaaaaatacccaagactgggcaatttgtaaaaaaaaaaaaaaaaaaaaaggtttaatttgttcatggttctgcaggctgtacaagcatggtgccagcacctggctagcttctggagaggcctcatggaatttttattcatggtagaaggtgaagcaggaacaggaacatcacacaggggaagcaggagtaagagagagtgtgagggaggtgccacacacttaaacaatcagatcttacaagtacgcactcactattgcaaggacagcaccaagccataagggatccacccccatgattcaaacacctcccaccaaggcccacctccaacattgggcattatatgtcaacatgagatttgaacaggtacaagtatccaaactatatcaagtaggcttcattcctgggatgcaaggttgcttcaacatacacaaatcaataaatctgattcaccacataaacagaattaaaaacaaaaaccacatgatttcaataggtgtgggaaaagcttttgataaaatccaacatcccttcacatttaaaaaaaaaaaaaaaaaaaacccttaagaaactaggcattgaaggaatatacctcaaaatagtaagagccatctgggacaaacccacaacaacataataataaatgggcaaaaactggaagcattccccttgaggacaagaaaaggatgccctttctcacctatcatattcatgacagtacttgaagtgctagccagagcaatcaggtaaaagaaagaaataaaagacatcaaaataagaaaagaagaaatcaaactacctctcttcactgactatataattctatacctagaaaaacctaaagcctgcaccaaaaagctcttggaactgataaacaacttcagtaaagtttctggatacaaaatcagtgtgcaaaaatcagtcgcatttctatacaccagtaatgttcacattgagagccaaaccaagaatgcaatcccatttacaatagccacaaaagaaataaaatacaactagggatgcatctaaccaagaagatgaaagatctcataattctgcacatgatcttcaacaaagatgacaaaattagcaatggggaaaggactctctagtcagtaaatggtactgtgataaatgtaaatgtcagtaaatggctagtcagtaagtgatactgactagccatatgtagaagaatgaaactggacccctacctttcaccatatacaaaaattaactcaggatggattaattattcaaatgtaatatctcaaactataagaatgtaatattcaaatatatctcaaactatatacaaactataagatattctatctcaaactatatacaaactgtaagaatgtaatattcaaatgtaatatctcaaactataagaatgtaatattcaaatgtaatatctcaaactataagaatcctataagaaaacctaggaaacaccattttggacatcagccttggaaaagaatttatgattgagtcctcaaaagcaattccaacaaaaacaaaaactgacaagtttttctgttaagaagccttagtttaagaaaaagaaactaacaacagagtaaacagcctacagaatggtgaaaatattcacaaactgtgcctccaaccaagatctaatatctggcatctattaggaactttaacaattgagcaaacaaaaaacaaccccatttaaaaataggcaaacagcatgaacagacagttctcagaagaagacatataagcagctaacaaacatgaaaaagtgtttcacatcactaatcatcagagaaatgcaaatcaaaaccacaataatatgctatctcacaccagtcagaatagctattatcaaaaatcaaaagaacaaagctggaggcatcatgctatctgacttcaaactatactacaaggctacagtaaccaaaacagcatggtactgataccaaaacagagatatagaccaatggatcagaacagagccctcagaaataataccacacatctacagccatctgatctttgacaaacatgacaaaaacaagaaatggggaaaccattccctattcaataaatggtgctgggaaaattggctagccataagtagaaagctgaaactggatcctttccttactccttatatgaaaattaattcaagatgggttagagacttaaatgttagacctaaaaccataaacaccctagaagaaaactattacctgaatggtaataccattcaggacataggcatgggcaaggacttcatgtctaaaacaccaaaagcaacagcaacaaaagccaaaattgacaaatgggatctgattaaactaaagagcttctgcacagcaaaagaaactaccatcagagtgaacaggcaacctacagaaagggagaaaatttttgtaatctactcatctgacaaagggctaatatccagaatctacaaagaacttcaacaaatttacaagaaaaaatcaagcaaccccaccaaaaagtgggcgaaggatatgaacagatacttctcaaaagaaaacatttatacagccaacagacacatgaaaaaatgctcatcatcactggccatcagagaaatgcaaatcaaaaccacaatgagatatcatctcacatcagttagaatggcgatcattaaaaagacaggaaacaacaggtgctggagaggatatggggaaataggaacgctttcacgctattggtgggactgtaaactacttcaaccattgtggaagacagtgtggcgatttctcaaggatctagaactagaaataccatttgacccagccatcccattactggttatatacccaaaggattataagtcatgctgctataaagacacatgcacatgtatgtttattgcagcactgttcacaatagcaaagacttggaatcaacccaaatgtccatcaatgacagactggattaagaaaatgtggcacatatacaccatggaatactatgcagccataaaaaaggatgagttcatgtcctttgtagggacatggatgcagctggaaaccatccttctcagcaaactattgcaagaacagaaaaccaaacactgcatattctcactcataggtgggaactgaacaatgagatcacttggactcgggaaggggaacatcacacactggggcctcttgtggggagcggggagaggggagggatagcattaggagatatacctaatgtaaatgacgagttaatgggtgcagcacaccaacatgacacatgtatacaaatgtaacaaacctgcacgttgtgcacatgtaccctagaacttaaagtataataataataataataataataataaataataataaaaaagtcaaaaacaacagatgctggcaaggctgcagaataaaaattgaactctcatacagggttgctgggaatgtaaattagttcagccactgtgaaaagcagtttggagatttctcaaagaacttgaaacagagttaccattcaacccagcaatcccactgggtatatatccaaaagaaagtacattgtttcttttgaatattgttctacccaaaagacacatacactcacatgttcattacaacacttttcacaatagcaaagacatggaatcaacctaggtgcccaaaggtgggttggataaaaaaaatatggtacatgtccaccatgggatactacacagcaataaaatgaatgaaatcatgtcctttgcagcaacatggatgcagctggaggccattacaccaagtgaggtaatataggaagagaaaaccaaatactgcatgttcttacttacaagtgggagctaaacattgggtaaacatggatataaaggtggcaacaatagaaactggggagtaacagagtagcgaggtagggagcagaaggaggactaaaaaactgttagatactatgctcattccctgggtgatgggatcagtcataccccaaacctcagcatcatgtaatataccccggtaacaaacctgcacatgtattccctgaatctaaaataaaagttgaaattacaatttttaaaaggatggaaactagtcatcaatgtgtttttaattttccaggtgactctaacattcaataattattttaaatattatttcggtctgtataccttctgccagctactaagtttcaggaattttgatggtctcattaaagagaatctgacaaccccatttacaagtgcttcagctaagtttcatttagaatagtttcatattgccaaggatccagtagtgtcttttttacagtgagttacaaattcctgtttttgtgacagtgacaggccaaaattaatgaactgtgatttttaaattgaaaaagtgactgtccaatggagactaaaaagaaaactaaaattatatttggtcaattttagtgttaagcatgattttttgctttgtatgttttagatagactttttcattgagataaaacccaaatagcataaaatccacctttttaatctcaaagtggtttctggtatattcacaatattgtgcagcaatcactactatctaactctagaacattttcattacctcatcatggaaccctgtacctgttagtagtcactcccagtttcccattcacctcatttcctggcaaacactaactacttttctgttgctctgtatttgactattcttaacattttatgtaaatcaaatactataatatgtggccttttatgtctgatttctgtcacatagcaacatgttttcaaggttcattcgtgttgtagcatgtatcagtattttattcctttttaagacaatactttattataggattataccacatcttgtttatccactcatcagttgatggacctttgggttgtttctacttttctgttactttaaataatgctgttatgagcattcttgtacatgtttttgtgtgatcatgcgtgtttgcttctctgggcatatacctaggagcagaattgcagggtcatatggtaactctgtatttaactttttgagaaacccccaaattgctttccccagtagctataccattttacattctgaacagaagtgtgtgagggtttctattacttcatatcctcttgctttctattttaattatttaattatttaatttaattatctaagatgccctttaccctaaccaaccagaaaataaacttgactgaatttagtgctaattgtttttgcatagttattcagtataattgtccttgacatctcaaaacactgcttatgcagaatacacttttttaaaatagtgaaatcatagcaattctatttcgtaagtcagttcttcttcagggtagtaagttataggtctttgaggtcatgttcctgtttccatcttccaaaaggctacattattagaatcttgttgctgtatctaccttggcatatccccctctctatccagagaaaagatcactgagggaatactgtccccacgtttctatcttagaggcctcattaggagtcactatgcttttaagagatggataaagagctagaaatcaagaggaagagagaaaattttaaataagacagaggagtatatgatcactctttctaagaagattaaatgaaataatttgaaaggcaataaactaactgcaccaagtaaatcttgtgaaagcgaaaggaaagaggagaaggaagatgattgattgagtgttgtctacggccataccaccctgaatgcacctgatctcatctgatctcggaagcaggatcgggcctggttagtacttggatgggagatgattgattgagtgctgaaaactaggataaattgtattcagccaccagcattaagggaagtacatacaatacattttatgaagaaagtgttccatgaaaataaaataacaaaaagtaagtttggtgaagatttaaatgataaatgccaatagtagtatatgtgcaatcatctcctgacactgctatacaaatgagctatctatataggctgtgaccacttaacttcacctgccaaaccacagtgctataaataaatacttttccaagacactacagagttcagttgacttgaaattcatcttacagtaactggaaatgtagactgtgcctttatttgggtcaatcctacagtttttttaatgtaccaggaattcattatttaaagtttactagggtttaatttaaaattataaaaaaggaagaagttggctaggcatggtgactcacgcctgtaatcccagcactttgggaagccaaggcgggcaaatcacgaggtcaggagatcaagacaatcctggccaaaatggtgaaacccagtctctactaaaatacaaaaatttgctgggcgtggtggcacgctccggtagtcccagctactcaagaggctgaggcaggagaatgacttgaacccgggaggcggaggtggcagtgagctgagatcgcaccactgcactccagcctggtgacagagtgagattccatcttaaaaaaaaaaaaaggtggggaggctgaggcaggaaaatggcgtaaacccgggaggcggagcttgcagtgagccgagatccggccactgcactccagcctggatgacagagcgagactccgtctcaaaaaaaaaaaaaaaagaaagaaattaatagttcaggtgagaactggtgaatttttattctcaactctaagctagtaagtgcttaaatagaagacttcacaacaagctgtaccttcctcaattctacagagaatcatgaggaaaatcaggtataaatgtgaatttcttatgttcagtactgtccaaaagaaaatattttattaaattttttgttggttgccatcattatttaaagccttcctgccagtagcctatactatttttggaatggagtgtttgtagtttcataaccacttggtaacaccataggttaaaaaaaaaaaaaaaaaaaaaaaaaaaaaaggctaccagtctttttcaaatggcctctttaacactgctttatagggaagttcagttacttttgacaataatgacaagccaaaaaaatttacacatctattttaccatattttgatacactagcagcatccactcaggacagtacctttattaaaaggggggttaaggtatttttaaatggaggaattcctgaattcctgaagctcttcaaacaaagtagcacttgggatacgacaagagtactttggagaaggctgcttggtcccaaaacagagattcaagaagagaactccagctagctgggtaaggtattccctcctctaagtgtttatgtaggcctgctgggggccaggaactgtgtaaaactcagtaaactcagtacttctcagcacagaatccagtcccaaggaagcacccagcaaaaatttagattgaatttcctttaaaataaaatgaagaaaaaagttaaatttaaaaaaaaaaaaaatacaattcaactactcagcccattctcttcagggtagctttggctcagaatggtggaagagttggacaggctattagggaactcaaaactccccaaacttcagttcagcactcttcctttataatatattttttctgaaaagagtattgccaatatatcaataaagctttttgctatgacttcagagtgtccaggtcactagggaaaagtatcaagtagcatcctgaatccacaaatcctttgagagccagccacacagtatctgcgtgagtctggtaattctctccccttatgagtgtcgtcacagaattgcagcactctccttttattgtttctcaggaaaacatagacaaagcctctgcttggatttttttttttaattttaacactaatatgtaataatacagcaacatctcctagttacctagaactcaggcttcgacagctgtgactgtctagaatacaaccacagaaaatcacctctgaacagtaagggaaatagctgccacagtatcaccacctactccaagcttgttcaacccacaaccaacaggctacaagtagttcagtacagctttgaatgcagcccaagacaaactcgtaaaccttcttaaaacattatgaaatttttttgcaatttgctcatcagctatcgttagtatgttttttgtcttgctcagacaattctcttcttccagtgtggcccaggaaagccaaaagattggacacctatactttggatgtttcatctagtaccaatatacttataattacgtgtttcaactagtactaatgaactttagttacaggatgaaattccaaattagcaatgttcatcatttgctcttcctaggtaacaacagttaacaaatcataggttgacaatcacaactgattttgaggatggaaataataacagtgagcatttatataatgcttactctataccaggcacttttctaagaattttacatagattagctcacttaatctttacaataaccctgtgacataccattattatccccattttacaggtgaggaaactgaagaagttaagtaatttgcccaagattacagattgtatgtaacagaggtaggatttgaactcaggagtctggcaccaaaatcagcactctcagcttctacccagtattatcaaaagtaatttcctggtaacttctatcaattgtcatggcgactctcgagataaagaattattgtttttaataaataatgtcattcccagaaatgaattatgtgtgaatcatactaagctgccgtgagagactgaatatcaccatcagagtggtgaatctacttagtgtaggggtaaaagaccaatctctcccagcagccctacacatagttacaccataattcagtagggtaatccctgatccccatgcagtcataaaaaaggttaaatgatgtttaacagatttcgctaatgattcagagaatcttaaaatacatcttaggaaaactaatttcaggagcaactttcagttagctagaaaatacagttctgttgagcatctcgtaatctatgccagacaaaggagacattcttgcctttctttgagggaattatagaccaacaatcttattaattttcaactttcatcgaggcaagattagcttcatgcacaatgtttctcaaactgaaagtagtgacctatattaataaatcaatttatagtgttgcaagcagcatcatttataatttgaagttagaattaattgcaggcagtaattttgagatattttattttacatgtatgtgtgtgtatctatcatataagtaaatatgtgagaacattttaaaatatttaaaaatgtttacatatttaaagtttaaacatgtaaatatatttatattaataatataattaatataaattaatatgttaatttatatgttattaatttatattaacaatatataaacaatatattcattagtaatatattacgtatattatgtaattgtattatatattactatattaaatatattaaaataatacatttaatatattaataacatactaactatatattattcatatttttaatatatcattttaatatatttaaatttatacttaaaatttacatatataaaaataattttcctgaaagtgactttcaaaaactttgaaagccaccagtgcaatggttaagaatacaaattctgggctggccatggtggctcacacctgtaatcccagcactttgggaggcctagatgggtggatcccgaggtcaagagattgagaccatcctggccaacatggtgaaacaccgtctctgctaaaaatagaaaaattagctgggcatggtggcacacacctgttgtcccagctactcgggaggctgaggcaggagaagcacttgaacccaggaagcgaaggttgtagtgagccgagatcacggcactgcactacagcctagcgacagagtgagactccatctcaaaaaaaaaaaaagaatgcaaattctgaagtgcagctgttgagtaggatcatggctgtgccacttaataaccaagtgactttgggccagttattttacttttctgtgcctcagtgtcatctatttggtagtgagaataatagtacctacctcattctagttttgagaataaacacgttttatattacatataaaatgtgtaggacagagacctcaaagaagacgtagttgctgtcatattgttgttctgttcctgcttaagaaggggacttggaaaagtaatgatgttgaatacagtaacttctttcatcatggaagaattgcatattcacatcttctttgctcatcaaacctttgaagatcatgcatgtctcattctgtaacattgccttaaccaaatataaaggctaaatacaaaggtgtttttaaataactgatacatttaggccagtcacccaaagattttacccaaagcctatgcaggcatagtccaagaagtagactagctctgctgcaatcaccatctcttgtttattatttgtgaaaggaacattacagtttcaccacagttggcctggcaacgtgcttattcagtcctcagaacatatgaaagtgatttcggctgacaataagtatttcctcactttggcttatgttcagtaatagccattctttatccagatcagggtgactgagcatgctgtaaccattcttctcttctaaaactgacccttgtttgattgcatatgcagattgcttagcagaacccacgtccaccataacgggccaaaagtcatttgatccaatgtgcttttctttttttctctctctctcttctttttttaattccatgaaattttattaagataaattaattataaacattacagaacacatttttttgagacagagtctcactgtgtcacccaggctgtggtgcagtgacacgatctcagctcactacaacttccgactcccaggttcaaacgattctcgtgcctcagcctccctgagtagctgggattacaggtatgccccaccagatctggctaatttttgtatttttagtagagacagagttttaccatgttggacaggctggcctcgaactcctgacctcaggtaatcctcccgcctcagcctcccaaagtgcaggaattgcaagtgtgagccactgcacctagacccaaacatgattttttgattgaatgcttaatgtcattgttttgttattattattattattattattattattattattatactttgttatggggtacatgtgcacaacatgcaggtttgttacataggcatacatgtgccatgttggtttgctgcacccataaaagttaattcaagatggattaaagacttaaatgttagacctaaaaccataaaaaccctagaagaaaacctaggcaataccattcaggacataggcatgagcaaagacttcatgactaaacaccaaaagcaatggcaacaaaagcaaaaattgacaaatgggatctaattaaactaaagaccttctgcacagcgaaagaaactaccatcagactgaacaggcaacctacagaatgggagaaaatttttgcaatccatccgtctgacaaagggctaatatccagaatctacaaagaacttcaacaaatttacaagaagaaaaccaaacaaccccatcaaaaagtgggcaaaggatatgaacagacacttctccaaagaagacatttatgcagccaacagacacatgaaaaaatcttcatcatcactggccatcagagaaatgcaaatcaaaaccacaatgggataccttctcacgccagttaaaagggtgatcattaaaaagtcaggaagcaacagatgctggagaggatgtggaaaactaggaacacttttatactgttggtgggagtgtaaattagttcaaccattgtggaagacagtgtggcaatttctcaaggatctagaactggaaataccatttgacccagcaatcccattactgggtatatacccaaaggatgataaatcatgctgctataaagatacatgcacacatatgtttactgcagcactattcacaatagcaaagacttggaaccaacccaaatgttcatcaatgatagactggataaagaaaatgtggcacatacacaccatggaatactacacagtcataaaaaaggatgagttcacatcctttgcaggtacatggttggagctggaaaccatcattctgagcaaactgtcacaaggacagaaaaccaaacaccacatattctcactcaaaggtgggaaatgaacaatgagaacatttggacacagggtggggaacatcacacactggggccttataatttctttcttcatttaggattaaagtcatttttgaagatcatttgcctattctttaaaaattgttttatttagtatgtctttgcacaaggttaattcggtgggttttcttttcttgagatggagtctcactctgtcacccaggctggagtgaagtggtgtgatcatagcttattttaacctcgaactcctgggttcaatcagttctgcctcagcctcctgagtagctaggactataggcacataccactacacccactaattttttaattttttgtagagatgggggtcttgctttgttgcccaggctggtctcaaactcatggcctcaagtgatatgccttggcctcccaaagcactgggttttcttaatcatgttaacaagtattgttttgttttgttttcttcctttccttgttgtttgtctgctgccaccccaacttgaaaagaaactgtcaactgctaatagttagttacactttggttagagggcacggttttctcttcacaccgccataccattaaaaaaaaacagctaagtcccctagcctttgttcaagaataatataaagtgtcagggactgtggacagcacctggtccatagcacatggtgcagtggagcagtggaggtcctccatttcaggacagatagctgctgactgcctttcactctcctacctggagctctctgaagaagactgtccttttccttcaaagactcctctccctccaaatttcccctcactccaactttcccctcactcttcagttgctcctcttcctcctttcttagtcccaaaccccaagccaactttgggaaattgcatgtgattgcatttggttgttatttctgctttgttgtgagttgtgcgtaaaaaaggatctccagcgagagaacagagaataaagcaaattaatacttctgtatataagagctgcttgaaatcctacttttatatactgtctgggaagataattttcctccaagggggaagctactaggtggcgaatgaggaagccaactttatcctgctcagcccatctgaagagcaaaacagtcacagtcgcgttaaagtgatatgtggcagccaacaatgcctccaagctcctctgacactgtcaaatgtaggtttagacttaatatcaagtttcatctagttttaaaaactggaatttagtaaaattattttcaagctttctaaaccacaatttcaggagcagtaccagtttaacaacttttttttccataagttattggggtacaggtggtatttggttacatgagtcatttctttagtggtgatttgtgagattttggtgcacccatcacccgagcagtatacgctgaaccctgtttgtagtcttttatcccttgccccctcccactcttctccctaagtcccccaagtccattgtatcttttttatgcctttgtgtcctcatagcttagctcccaagtatcagtgagagcatacaatgtttgcttttccattcctgagttacttcacttggaataatagtctggtcactgcaaataccattaattcattccattttatgtctgagtagtattccatcatatatatatatagattatatatgtatatatgtgtgtatatatagatatatatgtatatatgtgtatatatagatatatatgtatatatgtatatttatagatatatatgtgtatatatgtatatatatcacagtttctttatccactcgttgattgatgggcatttgaattggttccacaatttggcaattgtgaatggtactgctataaacacgtacgtgcaagtatcttttttgaataatgacttcttttcttctgggtagatcactagtgtgattgctggatcaaatggtagttctacttttagttcttaaggaatctccacactgttttccacagtgactatactagtttacattcccaccagcagtgcagaaacgttccctgatcaccgcatgcatgccaacatctattttttgatttttttcattatggccattcttgcaggagtaagatggtatcacattgtggttttgattttcatttccctgatcattagtgatgttgagcattttttcatgtgtttgttacccatttgtgtatcttcttttgagatttgtctattcatgtccttagcctactttttaatgagattgtttttctcttactgatttgtttgagtttgttgtagattttgaatattagtcctttgtcagatgtatagattgttaagattttctcccactctctgggttgtttgtttactctattgactgttccttttgctacggaaagtgctttagtttaattaggtcccagctatttatcatttttttttatcttttttttttttttttgcattttcttttgggttcttggttatgaaatcctcgcctaagcagacatctggaagggtttttccaatgttatcttctagaatttttataatttcagttcttaggtttaagttcttaattcatcttgagttgatttttgtataaggtgagagatgaggatccagtttcattctcctacatgtgtctagccaattatcccaacaccatttgttgaaaagggtgtccttttgccactttatgtttttgtttgctttgtcgaagatcagttggctatatgtatttgggtttatttctgagtttctctattgtgttccattggtcatctctgtgcctatttttataccagtaccatgctattttggtgactatggctttatactgtagtttgaaatcaggtagtgtgattcctccagatttgttctttttgcttagtcttgctttgactatgtgggctcttttttcattccatatgaattttagaattgtttttttctaattctatgaagaatgatgatagtattttgatggggattgattgaatttttagattgcttttggcagtatggtcattttcacaatattgattctaaccatccatgagcatgggatgtgtttccatttgcttgtatcatctgtggtttctttcagcagcattttatagctttccttgaagaggtctttcgactccttggttagggatattcctaggttttttgttttttgttttttgttttttgtttttgtttttgtttttgtttttgttttttgcagctactgtgaatggagttgagttcttgatttgattctccacttggtcactgttggtgtatggaatacctactgatttgtgtacattaatcttgtatccggaaactttgctgaattcttttatcagttctaggagctttctggaggagtctttagggttttcaaggtaaaggatcacatcgtcagcaaacagtgacagtttcttcctctttaccgatttgaatgccctttatttcattcttttgtctgattgctctggctaggacttccagtactatgttgaaaaggagtggtggaagtgggcatccttgtcttgttccagttctcagaaggaatgctttcaacttctccattcagtattatgttggctgtgagactgtcatagatggcttatattacattaaggtatgttccttgtatgctgattttgctgagagttttaatcataaagggatgctggagtttgttgaatgctctttcagcatctattgagatgatcatgtaatttttgtttttaattctgcttatgtgtggtgtatcacatttattgacttgcatatgttaaagcatccctgcatccctagtatgaaacccactttattgtggtagattatccttttgatatgttgttggatttggttactagtgttttgttaaggattttatcatctgtgttctttaggatatcggtctgtagttttctattttggttatgtccctccctagttttggtattagggtgatgctggctttgtagaatgaattagggagggctcctttctttatcttgtggaatagtgtcaaagggttggtaccaattcttctttgaatgtctagtagaattttgctgtaaatccatctggtcctcgacttttttgttagtaattctttaattactatttgaatcttgctgcttgttattcgtctcttcagggtatctaattcttcttgatttaagctaggaggtttgtattttcccaaaaatttatccacctcttttaggttttctagttcatgtgtgtaaaggtgttcatagtagctttgaataatcttttgtatttcagtagtgtcagttgtaatatcttctgtttcatttcttagtgaggttaaatggattttctctcttcttggttaatcttgctaatggtctatcaattttattcatctattcaaagaaccagctttttgtttcatttatctcttgtatttgtttgtttctttgtttcaatttcctttagttctgctctgatcttggttatttctcttcttctgctgggtttggatttggtttcttcttgtgtctctagttcttggaggtatgaccttagaatgtcagtttttgctcattcagtcttctgtaggggtttacggctctgaactttcctcttagcgctgcctttgctgtatcccagaggttttggtaggttgtgttgttattgtcattcagtctgaagaattttttttgtttttttgagacggagtctcattctgtcaccaggctggagtgcagtggcacgatcttggctcactgcaacctccgcctcctggattcaagcaattttcctgtctcagtctcctgagtagctgggactacaggtgcatgctaccacaccaagctaatttttgtatttttagtagagatggggtttcaccatgttggccaggatgtactcgatctcctgaccttgtgatctgcccacctcggcctcccaaagtgctgggattacaagtgtgagccaccacgcccggcccagtctgaagaatttttaaatttccgtcttgatttcctttattgacccaatgctcattcaggagcaagttatttaatttccatttatttgcatggtttaaagattccttttagagttgatttccagttttattccacggtggtctgagagagtgctcgatataatttcaattttcttaaatttgttgagtcttgttttatgacctatcacatggtctatcttagggaaagctccatgcgctgttgaatagaatgtgtattctgtggttgttggatgaaatggcctgtatatatctgttaagtccatttgttccaaagtatagtttaaatccattgatcctttgttggctttctgtcttgatgacctgtccagtgcagacagtggagtactgaagtcccccactattattgtgttgctgtctgtctcattttttaggtctaattgtgttataaatgtgggagctccattgttaggtgatatgtttacaattgtgatattttcctgttggacaaggccttttaccattatataatgtccctctttgtctcttttaaatgctggtgctttaaagtttgttttgtctgatataagaataactatccctgctcacttttggtgtctatttgcatgaaacgcctttttccacccctttaagtttatgtgaggccttatgtgttaggtgagtctcctaaggcagcagatggttggtgagttcttatccattctgctgttctgtatcttttaaatggagcatttaggtcatttgcagtcaatgttgaaatgtgaggtaccattgcattcatcatgctctgtgctgcctgtatactttggtttttttgtttttggtttttaacttgtatttttgttttataagtcctgtgtgatttgtgctttaaaaaagttatcttttgatgtttccaggatatgtttcaatatttagagctccttttagcaatttttgtagtggtggcttggtaacggcgaattctctcagcatttgtttgtctgaaaatgactgtatctttccttcctatataatgcttagttttgctagatacaaattcttggctgataattgttttgtttgaggaggctaaagatagggccccaatcccttctagcttgtaattcttctgctgggaaatctgctgttaatctgataggttttcccttataggttacctcgtgcttctgtctcacagctcttaagattcttatcttcgtcttaacttttgataacctgatgacaatgtgcccaggcaatgattgtgatgaatttcccaggtattctttgtgcttcttatatttggatgtctaggtctgtagcaaggccagggaagttttccttaattattcccccaaatatgttttccaagcttttagaattctcttcttcctcaggatcaccaatttatcttaggtttggtcgtttaatataatccgagacttcttggaggctttgttcaatttttcttattctttgttctttgtctttgttgaattgtattaattcgaagacgttgtcttcaagctctgaatttctttcttctatttgttcaagtctattgctgagactttccagagcatttcgcatttctttaagtgtatccaaagtttcttgaagcttttactgttttttcctttaagctatctatttccttgagtatttctcccttcacttcttatactgttttttggatttccttgcattgggctttggctttctatggtgcctccctgactagcttaataactaacctcctgggttctttttcaggtaaatcagggatttctttctggtttgaatccattgctagtgtactaatgtgatttttgggggatgttaaagaacttgattttgtcatattaccagggctggttttctgatttcttctcatttggataggctctgtcaaagggaaggtctagggctgaaggctgttgttcagattcttttgtcccatagggtgttcccttgatgtagtactctcccccttttcctatggatatggcttcctgtgagccgaactgctgtgattgttgtctctcttctgggtctagccacccagtgagtctccccagctctgggctggtactgggggttgtctcacagagtcctgtgatgtgaaccatctacaggtctctcacctgtggataccagcaccagttccaataggggaggtggtggagggtgaggtgcaatggactccgtgaagtttcttagctttggtggtttaatactctattttgtgctagttggccttctgccaagaggtggcagtttccagagagcatcagctgtaatagtatggagaggaactggtggtggacagggctctagaatgaccaagattatatgccctttgtcttcagctaccagagtaggtagggaaagaccatcaggtggggacagggctaggtgtggttgagttcagactgtccttgggcaggtcttgctgaagctactgtggggaatggggatgggattctcaggtgcctggagctgtgtacctaggaggattatggctgcctctactgggtcatgaaggttgtcaaggaagtgggggaaagccagcagtcacagaccttacccagctcccacgcaaaccaaaggaccagtctcactcccaccgtgacccccatgctagccctgagtctttccaggccatgggcgagatgggcttgaaaacttgccccaggctacctgcctcccaactgtgaaagaaaacgacttggctcttcccccagttgtggaatctgcacaccagatttgcaccctcccccaagttctggccaggaggcttcttgccccttcaaattgttacaaagttcagcaagagaggcttcttcctgtgcaattttaccccctgctcctcttgccaccctccctatggatccctgtggtgccaggccagaatgggctgctcgaggacccagcaaactcccagggcctttctgctgcttcctctacccctgtatttcgctcagctctgtaaattgactcagctctaggtaaggttggaaacttctcccacaaacacaccttcagttcctccagtgggggtatatattcagcagaggagggtctccgtttcacaattccacagttgaggcactcacagtatttggggtgtctcccgggtcctgcaggggcagtctgcttccttcagagggtctttgggtcctctcaggattgcgggtttgttcttgtagtcaatatgaagcttaaattcacatcacgagctctgcagtcttctctgtccggagttgcaatctagtcctgcctcccaaccgccatgatgatccagcctacaacttcttaattaattaattcttattgctggttcatagtctgtcagaagtttaggtagtattatcatttagatgtactactttgcacacatagttaaaatatcttagctcttcaaacattcgtcatgaaacatgattgcactcttctgaagtgacagtattcatcatatcctccccacatcctcctgaactaggctctcgggagttcatagcaagtgttcactcttaatatatatgtctgctagaactgatcagggaatctaacaatatggaaagccaccttctcagtcttacatctaactttatttctctacagtagtggttctcaacatggattatgctttgcaagcacctggggaactttaaaaaaaatctcaatacccaggctgcatctcaggttgattcaaatctctggaagcagaccaaggcattagtactttttaagtctcctcccttcgttccaatgtgcagttccagttgggaattgcttttagcgcatgccaggttactaatttctgagtgttgattaagggaacatccgagctcatcatttctcttgtgggaattttttgagaagcaagagagattggggaacaaaatagctactgttttttgctagtgcaaagagcttagcttaaaatcacacagacctatgttttaatcccatctttgctactacaggaatgtaaagatgggaaactcacttatctcccctgcagtttcacccatttctaaattgaaataacatccaccttctggagtcagtattaaatgagatcatatgtgcaaagtgttcaacatgatgtagtatgtaacatgataggacatagtaataataactaaagatatcactacaaatcaaaatccttattttcaaaattaagtctccaaagaggaaatgaaaatgaatcccaaatctgttgcctagatttttgagtgccaagcagcattaatgctaatatttcttcagcattatcactaagagaaatgagtgttccaacttaactcattgttcttagtgataattcatttagggacaaaattaggctctcctgttaattgccacattcctttcagaggtgctataaatggatgttgaactatactatttttagatttaatctttaaaaatcataagaaagcaataaatattactagttcagaaatgattttctgttcctggcttatcagagaagacctgagagtctatcatagtcatttgttgtcttcatagtgaaacgaaaaagtaagattctaataggatttttagacttagtgagaaaggtgttcattttaagattatggtagttcctctcagatttggaaagccttaagataacactaaggagttggactttaggaatgctgagtgtcttcagccacaatggcactatagtactagatgggacaggatgtgattaaggagaaactaagcagccagccacaatgtagttcttcttgcctccaaaagaggagttactcactttctcacactcactgtgatacattccatttgctaagaaaagtggcttgtgtcattcttgtgcactacttttaagttctgatatattagattcatttactctgtattaatagcattcaaatatttagtaaagttaatatacttctcacactttttccaaattaacccaccagctgtgtcctgtgcttaacgctatcttacaacactgcagtcaaagtgtcagccagggctgtggtctcatctgaaggctggatagggaaaaattggctcccatgttcacttacatggttgttgccaggattcatttcctcaagggttttgattctgagggcctctgcttcttgctaagtgttggccagaggccatgcttagttctttgctgtgtggttctcaccaaacagcaacttacttcatcaaaccagcaggagggtgagtctgctagttaaaaagaagtctcaatcttttgtaacctaatcatagaactgacatgcgctccatgctaccatattcttttgattagaagcaagttactcaagggaaggaaacacataaggctgtgaatgagagaagacaggaattgctggaggccactttaggggctgtctgccacagcacttaacagcacattcccctagccataaaatttaaaaaagcaggaaagagagaaggagggtgcagggtaaaatacagaaaggaggaaggtgaaagggaagaaaggaagggaaagaaagacatttaaaaagacaagaacaaaacagctctgctgcactacatctatgtagtagtgtagtggagagttccatgtgcagacacacacttcatcacattagcaccacacccataaatttcctatttcttatttacaatgagaagattataaggactttctatgcatctggagttaaaaggaagcaataaatctaagaacactaagtttaagtaagcaaaatgtgtttcaaattagttattttttctttttaagttttttgtttgtttgtttcagctgacaaagttttttatttctttctgtttcaagttttcaagttgagtttataattcttgctattatgtaacaggtctattatacaggcaatataggaacctgattggcattcgtatttggtgttctattgttgtttcaactcaaatgccaaaattatgtttttgttctgtacgttattgttcatagttatatatgccccttaattgtaaaagtgaagctgtaaaattgtaaactactttgtaccttatctatccaggcattctactaaggaaatcaagacccaaatggcttgggaagatcaacattaaatagcgtcagagccagaccgagagtatacatctctcaattgctaatctagtgcatttgcttttcttatttctgtgcaaatgaacagttagaatgtgaaatagtctcctcagatctgccagcattaaaacagttgtggtttaagtatttagttttaataattactaactttgtagaagaacctaaaatagtgtttgttttcagtgcttcagctaatagtaaaaaggagtattttcagtactttactgtatgagaggtgcttgcctaacaaaatacacatctttttcactgtactcatttgtaacagataatgtgggctccgacacctcagtgttctgagaggggttggtaaacgctgaccacatagagagagctgcccatctgccctcagtaccaaggcacatcccatccatgccctaaaactcttgtaaatttctccattcgtacaggaaaatgagtatttcttacaacaatatgaccgtggaatttgattacaaaaacattcctgctatccccaacatgtgctcccagggctaaagacataatctgcaactcaggattttctgaagattcacttgtttatactattgagggcaacagttgtttttaaacaaggatgcggttcccagtcctatactttcttcttaccctgcttatttttctttttttattattatactttaagttctgaggtacatgtgcagaacgtgcacatgttacataggtctacatgtgccatggtggtttgctgcacccatcaacccggcatctacattaggtatttctcctaatgttatccctcccctagccccacagcccctcaacaggccccagtgtgtaaagttcccctccctgtgtagatgtgttctcattgttcaactcccacttataagtgagaacatgcagtgtttggttgtctgttcttgtgttcgtttgctgagaatgatggtttgcagcttcatccatgtccctgcaaaggacgtgaacacatccttttttatggctgcatagtattccatagtgtatatgtgccacattttctttatccagtgtatcattgatgggcatctgggttggttccaaatctttgctattgtgaacagtgccacaataaacatacatgtgcacgtgtctttatattagaatgatttataatcctttggatatatacccagtaatgggattgctgggtcaaatggtatttctagttctagatccttgaggaatcgccacactgtcttccacaatggttgaactaatttacactcccacaaacagtgtaaaagcgttcctatttctccacatcctctccagcatctgttgtttcctgactttttaatgatcgccattctaactgatgtgagatggtatctcactgtggttttgatttgcatttctctgatgaccagtgatgatgagcattttttcatgtgtctgttggctgcataaatgtcttctttggagaagtgtctgttcatatcctttgcccactttttgatggggttggtttttttttttttttccttgtaaatttgttgaagttctttgtagattctggatattagccctttgtcagatgaatagattgcaataattttctcccattctgtaggttgcctgttcactctgatgatagtttcttttgctatgcagaatctctttagtttaattagatcctatttgtcaattttggcttttgatgccattgcttttggtgtttgtcatgaagtctttgcccatgcctatgtcctgaatggtattgcctaggttttcttctagggtttttatggttttaggtctaacatttaagtctttaatccatcttgagttaatttttgtatatggtgtaaggaagggatccagtttcagctttctgcatatggctagccagttttcccaacaccatttattaaacagggaatcctttccccattgcttgttttgtcaggtttgtcagatggtttgtcaggtttgtcagatggttgtggatgtgtgatgttatttctgaggcccctgttctgttccattggtctatatatcttatttggtaccagtaccatgttgtctttgttactgtagctttgtagtatagtttgaagtcagagacacaatagaaaaagaaaattttaggccaatatctctgatgaacatcaatgcaaaaatcctcaatacaatactggcaaactgaatccagcagcacatcaaaaagtttatccaccctgatcaagtcagcttcatcgctgggatgcagggctggttcaacatacacaaatcagtaaacgtagtccatcacataaaccgaaccaatgatgaaaccacatgattatctcagtagatgcaggaaaggccttcaacaatattcaacagcctttcatgctaaaaactctcaataaactaggtattgatgaaacatatctcaaaataataagagctattcatgacaaacccacagccaaaatcatactgaatgggcaaaaactggaaacattccctttgaaaaccagcagaagacaaggatgccctctctcaccactccttttcaacatagtattcgaagctttggccagggcaatcagacgagaaataaataaagggtattcaattaggaaaagaggaactcaaattgtccctgtttgcagatggcatgattgtatatttagaaaaccccatcatgtcagcccaaaatctccttaagctgataagcaacttcagcaaagtctcaggatatgatatcaatgtgcaaaaatcacaagcattcctatacgccagtgacagacaaacagagagccaagtcacgagcaaactcccattcacaattgctacaaagagaataaaatgcctaggaatccaacttacaaaggatgtgaaggacctcttcaaggagaactacaaaccactgctcaaggaaataagagaggacacaaacacatggaaaaatatcctcatggataggaagaatcaatatcatgaaaatggccatattgcccaaagtaatttatagactcaacgctatccccatcaaactagcattgactttcttcacagaattggaaaagaactactttagatttcatatggaaccaaaactgagcctgcatagccaagacaatcctaagcaaaaagaacaaagctggaggcatcacgctacctgacccagcttatttttctacataggatccccacatccctgcctttgttagaatggaaactagacaaggaccaacttttatcaacttgttcatttctctattcctagaacagagcctggtacaaaatttgtgtttaataatgtttgttgaatgaatctgaatgatggatttgtttagaaggtttgtaacattccatcccttatgagtttgttgctagtggaaaaaagaggcatgtttttggttcataacatcaggtatgtaacctggaatttggaatcatgagttttcatgcatttgcttcatattatttatttttaagtgatctttcaaagtattgataaagatactttaagattgagagcctccctgatacccaggaatgaaagttttagattaagtttacaatctgattgaaggctaatcatataaggagaaaaaaaataaggaaaagaacagaaatttggaaagaaatctccaaaatggccatgaacatcagaacactgagaatcgatatataaacatgtgttttgcttcatacctgtctgttgtacatctatagcagcagatttcatagatgcagaggaattttggctaaaatcctaacacataaaaggcattctgcacttacttctcaaattagaattaatacatgtgtatgtataagttgtttagaattggcatctatttaatgagtttactggctgaatcttttaaaagaatgcaaacatacgtgacttttatcaaaaatctatgaaaagaaaaatggccctgtagtgcatcctgtggttcccactctacatcccccacgtccacctgatgtcagcacaaccatctgtggcatccattggccactatgccagtcaggtgcacactcaggtgcctgcctcggcaaagaccctcagctcatgtgcaggtagagcctagaagtgcatggaggtgaacatctctgaggcacccttcaaccagtgggtactgggagtgatagataaatgtcctagcctctcatctttctacacaacaatgctggtgcatattctacacagtagctcagtaacacacgcatattagttgttctccctttccttcccaccctccccattccctcactgctacatctggaagccagatgaactgcctatatccaaattctaatctctagctctcgtttcttaaacaggtcctacaaaatgcttgaaataaaaggcaaaatggtttgtatctggaatcaaaggctgacaatggcaagcaacaagctctaaaactgacacaggaaaaatgcttttctggaagacattggcatcacctcctagacacggaatatgctggcttcatcccagtagtttcttcacacacttttaaatacgtgtctcattaggatcacatatgacccacctgatttcatgccttgccttttctttttattctgcagactcttctaaggagcctaaattcaccaagtgtcgttcacctgagcgagagactttttcatgccactggacagatgcggttcatcatggttcaaagagcctaggacccatacagctgttctataccagaaggtgctgccctcatgcctttccaattttcctctccatggatatacctactaaagtacactgaatcacatatagtgtgggaatagaagtgatttgttgtgatttatgtaatctatgaatattcattcactcatttactgaaaaaaatattaattaagcctatcctatgtgctgagtactattttaggccctggagatatagcagtgattacaaaagacaaaatccctggtctcatggagatttccttccaatgcagggagacaggcaataaaaattgaataaaatgtcaactagtaatataggttattaagaaaaataaagccagaaagcagcatatcagcagtgtttgggagtttgtgtgtgtgcatgagaatgtatgagagtgtgtcaaagtatgagtgagagtgtgtatgggtacacgtgggcatgtgcctgtggatgagagtgtgtataagaggcttgagtgatattgaaatgggtgatcctaggaggcctctctattgtggtgtcctacaccagagacataagtgaaatggaacaggtcacgtgaatatctgggggaaaggctatccaggcagaggaaattgcaagtacaaagtccctgaggcagtcttggcctattcaaggaatgaaaaaggccagcactgaaggcacaagattgaaagtgaggagagtgatatgggaagagatcagagagttacttagggactgactatgccaaacctcgtagacaagggcaaggctttaaattttactttatttgtggtggaaagctataggtgtttttgaaaagatgcatgttttaaaagatgtagcttggtttctaaccagataatacactccttctcttaaatatattcagtaaaagactgtagtactttttcatttttaccagtgatcctctaaaataacagaggcagggtgaaacaaacacctctcaatataggtaccacccaagttgtttatttcttccccttcacctggcattatttttgtttttggtttactcttactctgtatatttttaccttttatacattttaggcttaaacacttcattatctcttcttttccacccaacccccagagaatgcctaagccaagatgcaggcttagtgaggaccctttatccttggctcaaggtgttcgttagtcggaggatgatattgtctatcccacggaagagctgggaaagggaaggaagatgcagccaacagttaagggtatgaactcagggccaacaaacctgcacttcagtgtacttctgcactttctctcttttttttttttgagacggagtctcgctctgtcgcccgggctggagtgcagtggccggatctcagctcactgcaagctccgcctcccgggtttacgccattctcctgcctcagcctcctgtgtagctgggactacaggcgcccgccacctcgcccggctagttttttgtgttttttagtagagacggggtttcaccgtgttagccaggatggtcttgatctcctgacctcgtgatccgcccgtctcggcctcccaaagtgctgggattacaggcttgagccacggcgcccggccaaggaatactcgggaaattagccagtttgtgtacaactcagcctcctcatttgcagaaaggagataacggacttgcctcgtggcttcttgtgaggatcgtatgagataacccatgaaaaatacttggcagagtacttgacacataataagtactcagcaaattgtagctgatattcttattatcggtagtatagtgataatttaaaaataattatgatatagcaatccagttcctggactataaagatgactataagtggtataagaccatttataccaataaattgttataattattggtataagaccattttaatgcagagctgctgcttaatttgcagataaaaaaatacttggagttagcaaccaagtggaccttccccacctttcagtgtaagagaggtctcttggatgaagtgaagtgaagatgaaatgtttgggcaccaattatactatatttttccttaaggctgacaccacaaagaggttggggcctgtaaacaaagttgatttctataaacacattcggacatgaagttagtatgtttgatgacacttttgaaatgtgtggaatcgttatgttatttgtgcaggcacaattagccaaactgtaaagaaaattagcagaataacctcttaagctgggcccactttatgaaaataattttttgctacctcagtatttaccaaatttgaatataagcaaaaagagaaatcgaaaggaatgaagccttgataaatatatgtcccttgccctcatcaatcagcgtcacataactgtttccacaggcatcttatgcacaccccagtcatttcagcatccctggttcaaatccagcatctacactaccaaggatgctgctgaaagtgtgactgggtagagggaaaatttcagacatattcagaaagatgtcttagattttaccctgatagtgtttggaatcccaggagagtaagtacaacttcatgattaagtgccaacccaaacttacaaaattagatatttgtgttttttctataaaatataactattttgaatatcttagccaaactactatgagcccacagcccagtttatcgaagaagggtaaaactgagggattaggagtatcaggattggactggactgattagtgtacagatatatttgacttctcattgcccacttcacaaagaagacaatacaaatgcactttctgactcttgtcattgtttcttagaactcagttgccaggcaactcctgaaactatagaaacatgcttcgcatccctgacacataaataaaactgtggattttatccaaaaccagagtcagtgggaggtgcagttgtttcagtttgctggcctggcctgtctaaagcacaatggaatgtgaacatgtcaggctgtcaacacgacatttcaggcacagccctacaggcagttgtgtgttttgcgtggctctgctccttgccaggtagctggcagaagaggcagcctccacatgttaaagcagctgattcaaaacagtctctgccatcctgtgatggcgatagtgccaaactcagcctctgagcttgcaggggactcgggatgaatgcacattacaggcatggcaaaaggaggctctgagaagcatgttcgagctgctctgctctcagctccttgcatgtaaaagctgtatttttaaaggaactgggcatgtgaacactcagtccttaaagttgtatccctcacctcttccatacccattcaaccccacttcaaaaattaccctagtcttaagagaaattttattttctatacaaggttgtgtggaaaatcagtagggagaaagggcattattactttcatttttcttaaacaaaagtattgaatttaaagccaaaaacatgtgagctttctgtcatgaaaacagctgcccttaaaaacataaatgaggttttatttttattattttttccagttggttgtctttagatgaaaaacatttcttctgctctttattcttatttttaatgatagtctctttctatggttctcaccccttccatttcacaagatagtctggcagcaaacctaaagcacttaacttttgggagtaagagcaaagggtagcttccatgaattgatttgggtcttctgtagagacattcaacccagagaaggcaagtgacacagtatctgttttatgagctaatttgggttcttgtctacatttaatagtttaaaatataagttataaatatttatttaaagcgaaattcaacattggttcatgaagaaagaggttggaagcagtgttttgaactagctgtttctgatccatcatgcttaaaataaatgctttgtttgtcctgtggagttcatggatttgggataatctaaacagggttttttacacagtcctcatggggaccaaggtactgacatgcactgttgagaaattctgtgaatcatgaaagagttaatattttagaaatccagacctgttgagcactatctacatctttgggacgtcttaatactttgagttttctaactttcatactatcacttatgctaagtacatttgatatcccttctattatgtgaaagcttcattttctgggcaatcttcttacaactactctttttaatgcactcttacttagtttgaaagtaaatgtcaaattaagcatactatagttcaatgaaggacccacctattcctaatttttttaagcatttttcttctgactctacatacacacatgcttacacacgcacaaacatacacacacacacccccttatcttttcttctgccttttgcccacttactttttgcatcagagatgaatctcattcaagcacatgccagttgttttttgttgttgttgttgtttttgagatggagtcttgctttgtcgcccaggctggagtgcagtggcacgatcttgactcactgcgacctttgcctcctgggttcaagcaattctcctgcctcagcctacctactgaatagctgggattgcaggagcatgccatcacatccagctaatttttgtatttttagtacagacagggttttaccatgttagccaggctggtctcaaactgctaacctcatgatccacctgcctcagcctcccaaagtgctgggattacaggcatgaaccaccgtacccagccagcatatgcaacttttaagagtctcaaccaaagcagcaattcactatctcagcccctggagtctctgccatttaaatcccaatttccttccaacagctgaggagcagccgtctcaagtaccccctgatactacacaagttttctcctagtgccaagcagaccagcctgagaaacagctataagaaggaaataggcatcttctcccagctttgcatcccttccttccaggtcctgccttccttacagcctgcaatgtcctcattgtccactgctgcccagcacccatcccacagagggatggtcccaaacctccacagtctggcctgtgagccacaggagcctctggctgcacaggccattcctacctcatcttccacaaccacagattacgtggttttatgtccctttgacttataaattatcttctcaattaataggctagtgaataacaggggataatgaactacctcacccaagtagcaattctaatttaagaaaactttcctgtcattccattgccttttgcttcccttaccacactcatgcccatacttccttacctcaatccctctgacctctcagtttcctcccttccttgccatattgccatctattaaacttttacccatccttcaagaatgctaaaaatacacctccaccttgaagccttccatgaagagccacagcaatcattccctcttctgaacttttaaggaccctagagagcactactaatgagcacttacccacattgctttgtaataccattttttactctttccttctgaggcaggaggaattccttagacatctatgaatcccccatagtgtctgtcattatgtttcagacataaccaattctcattaaatatcaatgtaatgaatataagaggcccaaaaaactactcagatgggaatttgagtcttattttagcctgaaattaggggaccacaacttacttatctttatatctacacagtgttggtgctggatgtaatgcatcactctgcccggagcacacatcaacttgtctcctcagtttctttcaccataggctgggaaaacagccaggtctaaactttcactgttctctgggactctctagtttggggtgattctctgtactgttttaatgaacatttttaaaatgtccctaagtctcagaaccttcatctataaaatgggcataataaagtacctaccataggaatcaatttatgaccaggcatagcatatacattcaataaacggaaggttttaccataggcagaaacaccaaatggcctcttagcagtcttcagacactgatgatattgtccaccaatgtgatatgtcttggaaatggtgttgctaaaacacctcttcacaaaatatttgtgttccaatttattgaatcagactatcaagcaccttacttggacttcagctacaacatgatttttggaacaattaatcttttttaatcctccattttaggaatattcaaggacagactcaagaatggaaagaatgccctgattatgtttctgctggggaaaacagctgttactttaattcatcatttacctccgtctggataccttattgtatcaagctaactagcaatggtgatacagtggatggaaagtgtttctctgttgacgaaataggtaaatcacaggtttttgtttcatttgacatagttttacactaaataaatggggaagcctgcaaggtccaagtataatcaagtaggaagacttagtaacagtgttctatagatacgtggagatctgttttacaggagatgggatcagctggtgaacaagaggaaaagggcagggggaacttaagttgactttaacataaagtaacctggcagtaaatgatgtgaagaaaagaataggaaccttgtggagtcttttcctttaggatatctttgaagctgtgttgtgttcttatgttctattgcaaagggtaaacttaatatattcttaggatttcttacttcctaattatttgataggatgcttatattcagattcactgaaatacgttggcctttgacctctaccattgctataatcaaagcctagattttctttatcacaaagcataatcattctggaattttacatttacaaaacagccacagtcactttaaagacatgtttataagatctcagaacaaatactggagacagttagctcagtgaactaagtgaaagatccaaagagaggatcctttgcccatcatatggacacaaggtggaaacaaaacaaataaaacaaacaactataattagaatattcatgtttataccttaatagtataaacagcaaaatagaaagaatcaaagaaggacattgagtagctgaaattggtgcctcaaaatctatccacaaaagctaatttgttgcttataggaattcctcattgcttctcccaaatgtgttgttcttttatgtggttttctaggcataagctgactggaagagataggagtatgtggttagaagttacagatggaaacaaataaaatctaataggctgactttaagggagaagattaagagacctgtatcaagcagtaaagataacccaattgctttgcaaagacaatttagtatgtgtccttaacatcagtggtatagctgttgagctgaaactaaatgggatagcagaatgggatagtagcaagaatactgggttaaaacccatgttctaactctgttctctgccaatagcatatgaccagtcctactcatttacctggctgactttcactgaacacctgtcatgtgccaggcactgttctggtggtggtggtggttatagaataagtacgatacagtcgaagaagggagtcaggcatgttcacagataattgcagtgcagtgtgagaggttttagcctggaaatatgtggaatgcacagctgcaaaggtggccaaatgtgtgaatgattgacaggcctgagggatgaggaagggctgcacagagatggtgacagtttagttacctctgaactggaattggactctccctattttttaaaaagtggctacccacagtggtcaaaagcatgagtgagtgttgccaggtactgcagtggacttgcctttcagtaactactaagttccagcagtaacaaatagcacatgttcagggactcaggagcagttagaaagccctcctagtcagctggagaaatcatcagtagttgttcgtgccccaaaaaggaatttggagtttaactgtcacaaggtacctttgaggatgtttaaatagggaaatgacttgagaatagtaacagctaacagtcacaaaagacttaccacgtgtcaggtataaaaaccatcttttgcaatcgcactttacagataatgaaaccgaggcgcagggcatttaaaggactagttcaagtaaaacagctagtaggtagagctgggatttgaacctccagcctccatgcttttactcttgaggctttgcagtaccacttgtctcattatcaatgcctcagagaaattaatcttattgcaatgtgaaacatagattggagtgggacagactaaaggtagaagaggttagaagactgagatcatcaaggtaaaagattatgacaggcagctacaactagcacaatagttgtgggagaaggtgctgagagtgaaagaaaacaaagaactaaggtaaccctaatagatcttgagaaagttgtcaatcattataagcctcagcttcctcataaaatatgtatgtatggtactacctcacagggctgttctttggatttaaagtactgtattagttagacatttgtcattcattcaattcattcagcaaatatttattatgttcttttctcaggccagtcagtgttctccatactggggatagaaactgtcttccctggtgggatctaatcccagcgagggcggaaagtgacaatgctatggagaaatatagaaaaggagaataggagtgttgaagaggttgcagtgttgagttttcaggattggcatccctgagtcagtggcatttgaataaagaaggattagagaggataataatgtgtgtgtctcagggaagggcatttcagcaaaggggcacagccagaggaaagatctcaaagtagaagcatgcttttcctcactcagtgaacagcaggcaggcggtggggtgggcacagagtgagcgaggagactggtatgagaccaaatgccacagacaagacagtcaaatctacccaaccattgtaatgactttggctttcacttggagtgaggtaggaagcctttggagggttttagatgatgagtgatgtgatctaatgtgttaggataatcactgcgtcatttcacttgacgattgcatggagaatagactggagggggacaaagaccaaaggagtacagtggggagacaaatgcagcaagaagaatgaaaaaggataatggctaggaccaggttatagtggtgcaggcggtgagacatggttggattctgttatatcttgaaagtacagctgatggaatatggattagtgaggcaaaaatgagccaaggacgagttcattgtttttatcctgagcaactagaggaattgagtcctcattaacagagatgggaaagaggaaaggagagcaggttttggagaggaagagcaaaggtttgtttggggatatactaagtttcagatatttttaaaatatctcacaggaattgtcaatacagcatgtagatgtatgtgtagaggtaaaggagaggtcattattatgcctgtaatggtgataccaagccttttccaaaaggaccttgtctcatatcctctatttttcaaatgtagcgtaagtaataagttataaaaaaaatcttccattaaaaccagttttatagtttggtcactttaaagggttgagctttgattatcaggattcctgaatctccaacaaatccagaaagttgaggaattactgccattgtatcggcatatgtagtttggccattttgcatatccttccaatttaattttcaaaatgtagtcatgattcatcaaattttgactctccctgtttttaaaaaggtggtgtcgaccccagagggcaacagcattctcctccaccataaagcctgttttcatgtgggtgcacacaagagcttccctctttggccaccagatttgacagtcagtaagagctcctcactgtgtgtatctgtagagttatctccagtcaaccctagggatgcacactttgcaacactctaggtggccttctgtatatgacagaaaaactagcaataatttaccgggaaccatctagaatataaatttagacatagtttctggctttgaaatccatatttttcttcatcagcctttgagaaattgtggtctttgaggtcctaataagcagaatgcaacaaattttcctgggactgtagagtatatcagtagaacctgaggaaaacagtgtttcaagttgttcatgtgacagttaagaaaaagacagaaaacactgaatcgtcaccatttatgagactagcataatgccttcttccttcttatgtcagaagaaaacatcacatgtggctaggaagaccacaaagctagggagcgttagcagcgtgtgcaggaagatcgtatgagaagattgaagaagagtgaaaaaggataatggctaggaccaggttatagtggtgcaagcggtgagacatggttggattctgttatatcttgaaagtacagctgacagaatacggattagtgaggcaaagatgagcctttcggggaacaacacagaaatgagataaatgaggtatctgcccccaggccatacatagttgcaagaaaaaagatttctctacccctagttccacagcagcctcatgtctcaattccgtaggtttttctgactctgttttttcagtttcaagcgaaaatgaattcatttgccaaaatccagatgcatttatgatatcagagcaaaaagaaatataaaacatggcagatcttgaaaatattttttggcagattttttgctcccaaaggaatttttgtaagggcttatttaaaagttaaaaacaagtcacttttgcgttaaaaaaagttactctcttataaagtgaaagttataataagaaaaatattggaagaaataagagtatgaacgatcaaaaatatagaaagtaatttggtcttctgagaagaatgccttccattaataataaattgtgtctgtctgtgtactaatgctctgttgaattgcacagtgcaaccagatccacccattgccctcaactggactttactgaacgtcagtttaactgggattcatgcagatattcaagtgagatgggaagcaccacccaatgcagatattcagaaaggatggatggttctggagtatgaacttcaatacaaagaagtaaatgaaactaaatggaaaatggtaagatgtcactacaccttacactttgacttttctttctatttcatcaacctctctctcatttatcattagactttcttttgacctaataccacatgttcatgctgtatgcgccataatttcttatttgagaaaacatgatttaatcggtaaaatatcttgaaattctgttaagacaggagatgcttatgtatatatggaggcctgtggaaggaaaggaaaactatttctccattcattcttgaggtccagtttaactttagagtaaaattatagactggccacttatctgtctttggggatgtggataaaaatggaaaagtttgtgatcaaagtcaacagtgactatggccaaatattttcccatgatttcagttgctgctactcaaaagactcccattaaaacaaattcatacgtgtttacaggaaacagaggaagggaatttgtctcttagaggtttcagaaggatgttttgttacatacctcagagaagaatcaagctgagattctcacgtaggcaattagagagcatggtactggttaacctctgaatccctctcttccttaccaagcatatggaactcagcacttcgataaaattcacatggcacataacaagaggaaaaacaggagtatcatgctgctcccaatataactaattctaaatctgtctaaccacagccacaggcacagccaaaccaagcagtttctggccactcatcaggtgatgcccagcagcctggcacagatcactcccagaattttgagacaccaggacattcagtgaaccactgaaaaagatgccaattttgtcattagagggaagttaagtttggagatactttgagtagttgcaatactggactttggggctctattttctgaatcattttaatgtagatatctgttctgtaacttggtacaaataaaagtcctggttagatgctaagtcaaacaagactgtctacatccaagctacaatcaaacattattcagcaacaggtactgaaataactactatgcagaaggcactgtgctaaatacctgaggtggcggttctcaaagtgggaaccacagacccctgagggtccctgagaccctttcagagagttcagtactattttcacaatacactaaaatgttattttattcactatgctgaaatttaatttaatggcacaaaagcaatgctggaaacactgctggcaccttagcatgaagcaaggcggtaggatcaaattttactaatagtcattatattcttcatcatcatgcactgacagtaaagaagggggaaaaagctagtttcatgtatgatgttcttgatgaagctgtaaaaattgttaattttgctaaacctcaacctttgagtacatagcttattaatattctgtgtgacatatgggaattacacattaagcatgtctgctgcatactgaggtattgtatttgtcttgaagaaaagcgcttaaatgactgagctgccagctgaactagttgcttttattgcttggagcaccatttttacttggaagacaactgataaactggcagatggttattcatatttgaattggcaaacatttctcaaaaaagaatgaggtgagcttgttgcttcaagaaaaacaactgactgtattttttgccatggaaaaaatttgacttttcaaagcaattcattttgcctttttggaaaatttgggtctccaaccgtgagcttgatagtgttttaatatttgaagacttttcttgaagagattcatggtgatattaatgaaagtgattttttagttgtattgtgtaataaaatgtatgaaatttagaaaaatctacaagtcagtgaaccaatattttccaaatgactaatatattatgtaattaaatcatgcatggggaaatgatccattaaaagtactagatagaatggtgaatttttttaatgatcaaaaaattttttgtatatttattgtgtacaactttttttgaaatatggatacattgtagaatggttctatcacagtaagtaacatgcattaccacacacaccattttttgtgtgtattgagaacactgaaaatctactcacttagagattttcaaaatacaatacataggcattaactatagtcattattttgtacaatagatttcttaaactcgttcctactaactgaaaattttagttctttcgtcaatatctcctcaactctccaccctacccacaacccctgataaccaccattcaactctctacttctgagttcaacttttttagattctgcatataagtgagattatgtggtatttatttttctgtctctggatcatttttcttaatataatatcctccaggttcatccacgttgtcacaagcgacaggatatccttctttttttaaggctgatagcattccattgtatatatatacaccacattttctttatcaacttatccattaatggaacataggttgattctatttcttggctgttataagtaatgaacatgggagcccagatatttcttcaacatactgatttcattttccttggatatatacttagtagtggaataatataatggatcaggtggtagttctatttttaatcttttgaggaagcttcatatcatttttcatagagggtatactaatttacactcccaccaatagtgtgcaagggttcccttttgtccacattctcaccaacacttgttatctcttctttttttgaaaatagccatcctaacatctttgtgcactctatgccttctgtgagctgatagctcattgtggtttaaatttacacttccctgatgattaaagatgtcaagcatttttcatatacctgttggccatttctatatcttctttttaaaaaactatattcaggtcttttgcctgttttttaattgggttatttattttcttgctattgaattggtttagttccttatatatttcagatattaaacgcttatcagatgtattcaaatattgtctcccattccataaaatgtctcttcactctgttgattgtttccttggcagtgcagaagccttttagtttcatgtaatcccatttatctatttccacttttgttgccttgcccaatggagtcatatccaaaaaatcattgcccaaaccaatgtcatggagcttttactctatattttcttccaacagttgtacagtttcaggttttacatttaagtctttaatcaattttgagtttatttttgtatatgatataaaataagggtatgatttcattcttctgcatgtggatgtccaattttcccaacaacatttaaagacagaatccttcccttactgtatattctgagcacctttgtgataaatcaatttactatgaatgtgtggatttatttctgactactttattcttttacattggtttatgtaatgttaatgccagtaccatgctgttttgattactatagctttgtattatgttttgaggttggtagagtgatgatttcaacctttttctttttgttcaagattgctttggctattcatagtctattgtggttgcagacaaattttagaattgctttttctatttctgtgaaaaatgacataggaattttgataaggattgcattgagtctgtagatcgctttaggtagtaggaacatttgaacaatattagttcttctaatccatgaacatgggctatctgttcatttatttgtgttgtcttcatgttttacagtttacagtgtacagatctttcacctccttgtttaaatttatttctgggtattttattttatttttatttttatagctgttgtgaatgggatttttttatttctttctcagattgttccttattagtgtatagaaatactactgatttttatatgttgactttgtatcctgcagctttactgaatttgtttatctgttctagcaattttttgttgaagtctttagggttttctatatataaaatcatgtcatctgtaagcaaggacaatttaattttttcctttccaattttggatgccttttatttctctctcttgcttaattgctctgaataggattttgaattgagtagagtagagtagaatagaggagttacactgaatagaagtggcaagagtaggcatctttgtcttgttccttgtcttagaagaaaagctttccacatttcactgtttattctgatgtgagtttgttatacatggcctttattgtgttgaaatacattccttctatatctaattgttaagggtttttatcatgaaaggatattgaattttgacaagtgcttcttctgtatctactgagatggttccatggttttgttcttggttctagtaatgtgatgtattatgtttatgtatttgtgtgtgatgaatcatccttgcatccctgggataaatcctacttgatcatggagaatggtccttttaatgtgcttttgagttagtttcctggcattttgtttaagatttttacatctgtatttatcagagatattagcccataattttcttttcttgtagtgtcctttcatggttttggtattagggtaatgctagcatcaagaaatagtttgaaagtatccccttttcttccattttttggaaaagtttaagaaagattggtgttccagtgaagcttccagtgaagctgtcaggtcctgggcttgtctttgatgacagacattttactactgattcaatctctttacttattattggtttatttagattttctatttcttcaagaaaattttagtcggttgttgtgtgtaggaattgattcatttctcatgcatataatttttcagaatggtctcttatgaacatttgtatttctatggtattggttgtaatgtctcctccttcatttctgattttgtttttagtttgagccttctctttttttttttatgatttagtctagctaaggattggttgattttatcttttcagaaaaacttgtttcgttaatcttttctactgttttaatgtgctaactcaaaagcacattaaaaagatcattctccatgatcaagtaggatttatcccagggatgcaaggatggctcattacacacaaatacataaacgtaataatcacattactagaaccaagaacaaaaccatggaaccatctcaatattttctactctctgtttcatttatttctgttctgatctttattatttccttcnnnnnnnnnnnnnnnnnnnnnnnnnnnnnnnnnnnnnnnnnnnnnnnnnnnnnnnnnnnnnnnnnnnnnnnnnnnnnnnnnnnnnnnnnnnnnnnnnnnnnnnnnnnnnnnnnnnnnnnnnnnnnnnnnnnnnnnnnnnnnnnnnnnnnnnnnnnnnnnnnnnnnnnnnnnnnnnnnnnnnnnnnnnnnnnnnnnnnnnnnnnnnnnnnnnnnnnnnnnnnnnnnnnnnnnttctgactgctgtgatgtagtatctcattactgttttttgatatgcctctctctaattattagtaatgttgaccttttttttcatacacttgttggcccatgtttgtgttcttttgaaaagtgtttgtttatggcttttgtccactttttaatgagacttttttttttggcttgttgatttatttaagttctttatagattctggatattagacctttgtcagatgtatagtttgcaaatattttcagccattctatagattgttttttcaattgtttcttttgctgtgcagaagctctttagtttaattagatcccatttgtcaatttttgtttttgttgcaattgtttttggcatctttgtcatgaagtctttgctatggcctatgtctggaatggtatttcctaggttttcttctagggtttttatagtttggggttttgtatttaaacctttaatccatcttgagctgatttttgtgcgtgttgaaaggaaggggtccagtttcaatcttctgcatataactagccagttacccagcaccatttattaaacagtgttttcctaatttcttgtttttgtcaactttgtcaaatattagttggttgtaggtatgacactttattttggggttctctattctgttccattgatctatgtgtcttcttttttaaccagtaccatactgttttggttcctgtagccttatagtataatttgaagtcaggtaatgtgatgcctctgggtttattctttttagttaggattgctttgactgtttgagctgttttttgcttccatatgaattttacaattgttttttctaattctgtgaaaaattgcattgataatttgataggtatcacattgaatgtgtagattggctnnnnnnnnnnnnnnnnnnnnnnnnnnnnnnnnnnnnnnnnnnnnnnnnnnnnnnnnnnnnnnnnnnnnnnnnnnnnnnnnnnnnnnnnnnnnnnnnnnnnnnnnnnnnnnnnnnnnnnnnnnnnnnnnnnnnnnnnnnnnnnnnnnnnnnnnnnnnnnnnnnnnnnnnnnnnnnnnnnnnnnnnnnnnnnnnnnnnnnnnnnnnnnnnnnnnnnnnnnnnnnnnnnnnnnnnnnnnnnnnnnnnnnnnnnnnnnnnnnnnnnnnnnnnnnnnnnnnnnnnnnnnnnnnnnnnnnnnnnnnnnnnnnnnnnnnnnnnnnnnnnnnnnnnnnnnnnnnnnnnnnnnnnnnnnnnnnnnnnnnnnnnnnnnnnnnnnnnnnnnnnnnnnnnnnnnnnnnnnnnnnnnnnnnnnnnnnnnnnnnnnnnnnnnnnnnnnnnnnnnnnnnnntttcaatgtcacacttacatctttttatatggcatatttcttaacaaattattatacctagtgttatttttaataattttatcttttaacatttattctaaaataaaagtgatttacatactaccatgaaaatattagactactctaaattggactgtgtgcttacttttaccagtgagttttatactttcatatgtttttatgttataattagcctccttttctttcagctaaagaaccccctttagcagttcttgtaagataagtctgttggtgaggaatggttaatttaaatataacaaagtacaaaaagttcattggtagagtttcaggtttcatatttccactaacctttaagaaactatcatttgagtttagtctgttattaaacagaaatgttcacaattatgtgaaaagtttattaaaatattcctccttttcctcattatttatctgtgtgaggccaggttttattcatttacatcaaccaaaatagcacattctaatagatttaattcagaagcagttataaaaatacagtcatcttcaagtctgacattaaataaatttgcaaaaatgtaaaacaatgtcactcttctcactctattttttattgtttgggaaagcacaataatttttatgaaaatattattttaacaaaatcaatttattattttcattttaaaaattaggatttaaaaatttttccatttcaatttctaatacggtaactagtgataggtataacccaactcaaccaaaatctttaggattctcaaatgtttaagagtgtaaaggagtcctgaaacaaaaaagttaaacaacctagaaaaaaacaaagatattaatcagtatgatagcattcatcgattcaattaccatcatggcatccctaaaagcccatggtatatagttacatctcactgagccaccactttgaaactcccaccctgcaccaggtacttgtgagcgtgtaactttgttaatcaactgttcagggctgtatcccaacatggctttgctgcactttttgtggcacctctggtaaatctcattaggtagaccaaagggatcagttaactttttctttataacttttatttacgatattttataagtttggtaatttgcaaaggtcttggacaaagaccaggggcttatcaataataatttatctcttgaagaaacaaacaatataattggttatggagcacaggcatcataagcagaaaacaggtttataagtaaagggggaaaacctagtgtgtgttgcttgcatcaggaattcatgttaccatttggcaatatgaatttgcttagcagtgtgcagtgtgctttttttttttttttttttttttttttttttttttttgacaggattttgctctgtccccaggttagagtacagtggcccaatctcggctcactgcaacctccacctccagagttcaagtgattctcatgcctcagactcctgagtagctgggattccaggcacaagccaccatacccagctaatacaactaatttttgtacttttagtagacacagggtttcaccatgttggccagactggtctcgaactcctgacctcaggtgattcaccaacctcagcctaccaaagtgctgggattataggcatgagccactgcatccagccaccctttttagtaaatacattttgcatgaccgtgtagttgtttacagctatttatctagtaaaccaataacttacagttttttaaagacttaatggatagcatggaattattcatgatatctgcgccatatcttgagcacccactgtatacctgatgttgtactgggctttggaaatgaaaaataatgagttatcttggggaatttacaatgtaacatagaaagcttgtataactaaatttgcacaatgaaatataattaatgatagaagaagtatattatctggcagagcagagtggggaaaagtaccagcaaagacttagaatatcagctgtcctcaatacttgcacttagacttggatgagaaacagttccctgcacaagcggatgacagggttaggtatgataggagccatgtaagtaggagccactcaaaatctgagtttggtgtggctggtgtggagggttgagagaatatgaagagaggaccacaacttgaattactgagggcccttttttgattctattagtgaaatctttaaagaaattgtattggtgacagtaacagagaaataagggctttgaggatgaaaacataggctaaaaaaaaaaaaaaaaaaagcctaagaaaaaataataaagttcagtattcagtgtcctgccttaaaagcattttaggcatgcaaatatcccatatattcagaagatcctataaaaaatataaacaaaccctgtcatatacacatgaggcagaaaaaagatactttgtgagtagaaactaattgaggtaaaagaagaagaagaacttgttttagaagctgaaggcccagctgctgacttaataaaacaaattatgagaattttatttatgtgaaaatccatcctgttgaaaaaccgagtgtttaaagttttctataaacagcaacaaggtgttctaccaaaaatatatatatatatgaaaagcacattgaatacctgctttgagtatttgacttggaggaaaatagcatcactagttgagtatctctttgatagcaatatgtgttaaaagtctaacaatctcactctacccttccctgagaacgtaaaggaatatcctaaccttaagggttgtgagacctagatatttcttaccaaagaactcctgtgactctttattgcaaattttaaatagcaaactgttttgtggtggcttttagccttccagaacaagcgtattagatatgtagttccttttaataaaagtatttggaagttcaataaaggcaattatgatttttctaggaccttttccaattctgttattatgtgaatgactacccagaatttccatcaaacactgatatacaacttgctatggctacaatttattttggtgtggaaatatgtttgtttttctgttcttatgtctcccttcatacaaaagtgtaatatcccggatatgtagacatatagttctgccattcagagtaattctaatatgctttaatcttattaactatctggaagactaatgcacagctgtagctgcatttctttaagtgagtctatcatatatttgggtttataccaaactaaatttgtgaactattatccatttaaaaaatgattatttacataattatttgccttaatcttcctttaaatagcaaatgctcacgatgcattttaaaatattacctactttataaaaatccattctggatgcaaatgggggaatacctgtagtgtttattgcattgagttgttgattctttagccaatatgcatttatattttgtcttgaaagatggatcctatattgtcaacatcagttccagtgtactcattgaaagtggataaggaatatgaagtgcgtgtgagatccaaacgacgaaactctagaaattatggcgagttcagtgaggtgctctatgtaacacttcctcagatgaaccaatttacatgtgaagaaggtaaaagaaataaaagattaaaatagcagctaacctggcttttgtcaatataacagttgattcaaccctgcactgttagtgtgttgtccagatcaaaatatattagcatcagatatcacggtgagagaccttgagctcaacatctgaaacagatattgttcattgcaaaagcagaaggaagatttagtttccaaatttttcattcaggaaatgtccgggggacaggtggaagtttagagacaggaattcggtggcaatctccagatggtacaattcagatgattcttttctttatatatgtttatgttcccaaaattttctgtagtaagtttgttttgaatttataatcaggaaaaaaaaaagctgttctgatgattagggaagaaagtatgtttctatatggatggagagatatgtggcatctaagaggaaacctaatattgagtcggcataggtagtcaacagcagctgcataggttttagaaagtggaggtatggctttttcctagaggaaaggctaataagtagggtggcagtcatactcaaaggagacatggaacatttgaaaaccgtatgtaggagaatcacaacaatgattaaagttttttaaaatgggacctatgaatttagaataaaagaattaaaacttttagatacagaaataaagaaaactgattaataatgagcagaaagtatagagtattatgattctcaaatgggaattggctctattctatcttcactgaaaacagacgtttacagggctatatgtttgttaatgagataaccacaagctacatagaaaataaatttatatttctgcatttactatacaggtagaatctcatgatactaaatagcactagaatgaaaatttctgtagcaccattttctctaaactctagttaactgacttcttgtttccaaactatttgatataatgcaattctggtcttaaaagtatgatagctgtacacccttaagcttagtgtagtggcatttaattcacttaacatatattttttaaaatgtcttttcctctgttactaacaaaaaaagaaactctaactttatgttattttcctgaatatgtcactgatatgaaattagagatactacaagacaaaaaatgatttttttctcccccaccaattctttaaaatgcttatattatctccctaggggattttaataacttattaaataagaaaagactatttcagcataaaggcctacattttcaatggcaatgttcagataaatttcatctgtcatttctatgaaaaagtggttagcctctgtctctgtggtaagaatactgggaaccaactgcaaagtagctggcaggtacttaatcttaaggaatgaaatagaagttttacaaacaggttcccccaagtctcatacaaagtatactaaaacctgaagatgggagctcaatagtgatctttctgtcaattttatgtatataatatacatgatatatatttattatattttaataatttaatttcttgatataaatatgtatatttatagctgtaaaatatatgttctttgtgtctaagaagtttctgtcatgatttatcaataaaaactctgccttcatctttttgataaatcttcaatctagaggctatgataatcaccacacttaaaaaaaagtagaaaagaaaccaagtgggcattatttaggtagtgtgttaataagcaacactttttgcctagagctgaaacctttatgatactcccttgacacataatatgcttaaagcagattgtttgttttcataaaacacactgattttgcactatatgctgtttctttattttgaagtttttttaatgaggagatttgaaaagtggacagagatgttcataaaacagaaaaaaaactaagtcattgcattctgtttcagtggttatcaagagaaatcagtggctttattagatgaatacaaactgaattttttgtgaaaagggaaagggaaatgtaaactgtgcttcaactatttgtaattctgagagcgaaatattattgtgtgtttcagatttctactttccatggctcttaattattatctttggaatatttgggctaacagtgatgctatttgtattcttattttctaaacagcaaaggtaggtgtgaagtagtattctttggtattttttgccagttgtttagatttccatgtgtgtttctatttgttatttgatattttctttgtcaaattatgagtggaaattttagttaacctagtaaacttttatctccagttatatatttaccatttatataaaacccaatttgttgtatttatcatagacaacttagaggtttagattctatctggagacttgtacaggacattaagaggcttaggctggtgactatgcatacctcgtgatgtgtacctctttatccaagagctagctcttcccctcgagtcctcaacaagtttacccattcattccagatcttcagagtatcactgagcctttggctgagtctgatacagtccttatatatagacatttttttttccttgagatggagtctcactctgttgcccaggctggagtgtaatggcgcaatcttggctcactgcagccgctgccccccaggttcaagtgattctcctgcctcagcctcccgagtagctgggattacaggcacccaccactatgcccggctaatttttgtgtgtttttggtagagacagggttttgccatgttggccaggctagtctcgaactcctgatctcaatacacaggcaaaattttaagtggcaaactacccaggtagatagttaagtctaataaaacattttttagacttcatatgatgatgatttcaagtaaattcaggtttaatttaaattatttggatatttatgattttgtgtttcacctgcatttataaacacagctaaaagtctttataagtgtaaagagatttcattccactttctcttggaatcaaaagccttgagttccagttatcatttttgtcattgctgtttgaccttgtttgagtcccagaatctctccaggcctccatattcttatggttaatatgagggtatgggttatataatctttaaattttccttgagctatgatatatgttatttatattattccatttttcttcctgatagaaactcactacacactacaggaaatttttttaaacaaaatatgggaaaaatgattggtactgattgccagtgtcctacatttaaggttgttttgtttgtttgtttgttgtttttttctttgttttgttttgctttgttttgtttttttgagatgaagtcttgctctgtcacccaggctggagtctggagagtgcagtagcccaatctcagctcactgcaacctccacctcccaggtcaagcgattctcctgcctcagcctcccgagtagctgggattacagggatgtgccaccacgcccacctaattttgtatttttagatagtttcgccatgttggtcagactggcctcgaactcctgacctcaggttatccgcccgcctcagccttccaaagtgctgggattacaggcgtgagctaccgcgcctggccccatttaaggtatttttaaagtcccaatggttaaccttgcttcttctcctagaactaaggtgactgacactcccaggttgcctagagctctcctggtttttagcaatgcaagtcctgtgtgccaggaaatccctcagttccaggtaaccaaggcagttggtctccttacctagaattgaaaataggttctccagctgaagccaaaaggcatctataaatcaaaatgagatctatgttaatatattttaaagtattttaatttgttttgtaacgtagtataacatttgtaaacttcaaaatagaattttcttaggaagaagaattattgggacactagagttctcgagtgtcaagcatgctaaaagtctaactgaatgcagaaagggttattttcagtagagttttatgtccaattttataatataaaccaatgggaaagtaaaattcattctgcagaattccattttgcacctaactttctggcaacatttctattttccaaaaaagcagctatcataaatcacaatacaattttctgttgtttcaggaaaataaataaatatatttttagatttttaatttgtgtatttaagtaatgccaacaaaaaaagaaccaaattattctgttgattaatttcagttttttaatctatctatcttgtggggaaatttatacataacttcaatagataaactcacgaagtatataaagtaattatctcttagtattagttgtgaatttctagccattgtgaaggccaagtcaatttgttatgttgtttagttatattagctaacaatattaggaagaaacaattatcctctcaaaaagtagaatttccaagaaaacatattacttctaatagagtgctttttataaataatgaaattcttaactataatgtttagtcagaatcaccagattctacaattaatttgaaatctttattgttctcccaattttcctgcactaaattgaattttctgtaggaaagaattaacttttttttcatttgcccaataaaaacccttatcgttgtctaaatttgcatgttctactgaaagtgggaaatagtagcaaatatttgtcagcaagtatggacagaacatgtagttccaacaattaaattgatactacaaagaatgagatttttcttagaactgtagggctgtaaagtggcttcaggtcctacacgcctttgaaattttgtgagtccacaattcattatccaacccacttcaccctgctttaatccagttacttgagtcaactctagcaaaatttataattttatttgtatctgatacaaaatcacaaacttagtttcaagtcaggctatactggttcctaccacacaacccacccagcctttgagctgttaccaattgaggaaagaaataactgaatcagcccaaaatagaacttccaaaccaatagccaaattcagcctacagattcacattttattttattttaattagttttgattttagagtgaagattttcctacaaagtgtttgtaaaatacagaattttcacacaaaaatccagatttggggattatcttttaaaaaatgaaagatgtagtgaaactgaataaggcggcatatgctgcagcagacaaccagctgtcctatttgggactggcacacattctttaatgtgccaccatcctcattcctcctaatgactttgcaactggcttgctttattcatctgcatgatctgcttgggccccttagatttatggtctgccactgtgacataaggtcactacaacccctagaaaaccactagcacatgcctgaatgcatcatcctattcaaaaaggagaagcacacgtcacaaagtcaaacatcagccatttggaaacctttgcttcctgtcattagagttatgttccatctttttatgttttggagaatgtgaaatatcgatttagagatgcagaatcaagaaaaaaaaaaaaaaacagcaaaacagcagcatgacgcaaagaacctgggttttggtttggagtcaggttctctgggtttgagccccaactgtgccaactatcagtgcatgatttgaacatgttccttaattttccaagtttttgcacatatatatcatctgcctccctgggagtcataaggattaagtgaaatgtttagtgcaggggtcacaaacttatttcatggagtcagagtacatttttatgcttttcaagccatacagtatctgtcacaactactcaactctgccactgtggcatgaaagtggccatagacaatatggaaatgaatgaagatgcttgtgttctcataaaattttatctacacaaacaggtgacaggccagatttggcccatagaccttaatttagtgacccacagtttagtgcaaaatatatcccacagcgtctgatttatcagaagcactaaaaaatgagagtagttattattaataatttgtattgcttatttctatatctgtaattcattagtaagaatttgctttaacatttgccccactgagtagtagaggctacttaatgcaatttataaaatggaatttcccttattgcttggattaggtaaaatggcaagtagaaatattgagagaatgtattccttatgtaatggactagactgaccattcacactgagtggaatagcaactgatatccaaaaatcaggttaccacctcttcatgacagtgtcatctctgaatagtcaggagtttttttaaaagttaaatgaattgtttggaataatatctgagccttttttcagtgctataatttgatttttaaaaataaactcaggccgggcgcggtggctcacgcctgtaatccctgcactttgggaggccgaggcgggcggatcacgaggtcagtagattgagaccatcctggctaacacggtgaaaccccgtctctactaaaatacaaaaaattagccgggcgcggtggcgggcgcctgtagtcccagctactccggaggctgaggcaggagaatggcgcgaacccgggaggcggagcttgcagtgagccgagatggtgccactgcactccagcctgggcgacagagtgaagactccgcctcaaaaaaaaataaaataaaataaaaaataaaataaaataaaataaataaaaataaaaataaactccaggccagatacaatggcttatagcatataaatccagcactttgggaggatggggcgggaggattgccctgaggccaggagttccagacggctcgggcagtgactagagcaagactccattacaaaaaatgaaacaataaaaattagcctaccctgtagtcttagctacttacgaggctgaggcaggaatatcgcttggcccaggagtttgaggctgcagtgaattatgattacactactggactccaacctgggtgataaattaagatcctgtctcaaaaagtttaaaaaaaaattaaaaacaccataaactccaattacactattaattgtacaaaatagatacatgattaattcatttttatgaccgaaaaataatttaaagatttgcaacagaaaatgtaaatgcatccttgaattgtgtatataaacccatactgattagttagagatagttcaaatttagtctgtcccatctgaaatgaatcctctagtaaaaccctgtttaataagatcatcttagataatttcataattaatatgaactatatagctaacctacccaagtctaccctttttcaagggtgcaggtaatcttggctccatgtgtattgacccttttctcgttctttcttttctgtacaaattactgatgagatgtacactggaattgccttatagctgacatggaaatcagcttcagatgaaattaaatgtcttactttcaaatactatatctggctgaaaataaaaaagcattaagaaaaaaaggattgtgggaaaaacacattttcttttaatagacgtcagatgaggtttttcgggttttttaattgttcttttttttccttctacaatttttctttctcatttgctgtctaatattttcttctgtttctcatactccaattatataaagtaccagaatatttgggaaagtaatagtattgccaatattttatttctatcttttgctattattgagaatatgtagcttttaagatgtcaaaaccaaaattttatatgttttcaaggattaaaatgctgattctgcccccagttccagttccaaagattaaaggaatcaatccagatctcctcaaggtaattaataattttatctaaattgtggccagtactaattaacacctgaagaatcctgtcatatgtttaaagttttctgtgagctatatatatcacattcaattttcttgtatcttgtctcctagagaaaattttttaaaatattctctcttaaaaataagaaaatgtcatatgtataaaaagttatgcactaatttatgttttgtgatatgttttgttactgttgttcttattgtaaccataattaatctctgaacatcatttgctaattcatttaattattatgagtttcttttcatagatcttcattttctttctattttctaggaaggaaaattagaggaggtgaacgcaatcttagccattcatgatagctataaacccgaattccacagtgatgactcttgggttgaatttattgagctagatattgatgagccagatgaaaagaatgagggatcagacacagacagacttctaagcagtgaccatcagaaatcacatagtaacctaggggtgaaggatggcgactctggacgtaccagctgttatgaacctgacattctggagactgatttcaatgcaaataacatacatgagggtacctcagaggttgctcagccacagaggttaaaaggggaagcagatctcttatgccttgaccagaagaatcaaaataagtcaccttatcatgatgcttgccctgctactcagcagcccagtgttatccaagcagagaaaaacaaaccacaaccacttcctactgatggagctgagtcaactcatcaagctgcccatattcagctaagcaatccaagttcactggcaaacatcgacttttatgcccaggtgagcgacattacaccagcaggtagtgtggtcctttccccaggccaaaagaataaggcagggatgtcccagtgtgacatgcacctggaaatggtctcactctgccaagaagacttcattatggacaatgcctacttctgtgaggcagatgccaaaaagtgcatccctgtggctcctcacatcaaggttgaatcacacatagagccaagctttaaccaagaggacatttacatcaccaccgaaagccttaccactactgctgggaggcctgggacaacagaacatattccaggttctgagatgcctgtcccagactatacctccattcatatagtacagtccccacagggcctcatactcaatgcaactgccttgcccttgcctggcaaagagtttctctcgtcgtgtggctatgtgagcacagaccaactgaacaaaatcatgccttagcctttctttgatttcccaagagctacgtatttaatggcaaagaattggctggggcaataatgtttaaaccaaaacaatgtttaaaccttttttgcaggggtgacagggtgggatatggattctaaaatgccttttcccgaaatgctgaaatatgatgttaaaaaaataagaagaatgctcaatcagatagatatttctattgtgcaatgtaaatattttaaagaatggtgtcagactgtttagtagcagtgattgtcttattattgtgggtgttaatttttgatactaagcattgaatggctatgtttttaatgtgtagtaaatcacgctttttgaaaaagcgaaaaaatcaggtggcttttgcggttcaggaaaattgaatgcaaaccatagcacaggctatttttttgttgtttcttaaataaaaaaacttttttatttaaaaaattaaattaaaactagaggtgagaaaatcaaactgtaagcaagaaggcaaaaatagtttggatatgtaaaacatttattttgacataaaattgataaagatatttttaataatttagacttcaagcatggctattttatattacactacacactgtgtactgcagttggtgtgacccctctaaggagtatagcaactacagtctaaagctggtttaatgttttggctaatgcacctaaagaaaaacaaactagttttttacaaagcccttttatacctccccagactccttcaacaattctaaaatgattgtagtaatctgcattattggaacataattgttttttaaacaaatatttttttagcaaatttttaaacaaatatttgttaatttagaaaactttaaagtgtttgcacagatcaacttaccgggcaccaaaagaagtaaaagcaaaaaaagaaaacctttcttcaccaaatcttggttcatgccaaaaaaatacatgctaagagaagtagaaatcgtagctggttcatactgaccaagatgcttaagtgctgcagttgcacatggagtgagttttttagtgtgtgcagatggtgagagataagatctatagcctctgcagcagaatctgttcacactcaacttggttttgttacataattatccaggaagggaataaggtacaagaagcattttgtaagttgaagcaaatcaaatgaaattaactgggtaatcaagcaaagagttcaagaaataggtttttgtttcacagcctataaccagacacatactcatttttcatggtaatgaacagaacatagaagaaacaaggttttcagtccccacagataactgaaaattatttaaacctctaaaagaaactttctttctcactaaatcttttataggatttatttaaaatagcaaaagaagaagtttcatcattttttacttcctctctgagtggattggcctcaaagcaagcattcagaagaaaaagaagggacctcaataatttagaaattattttgcaatcccttaatatcctaaacatcaggttttgttgttgttgttgttgttgttgagatggagtctcactctgtcgccaggctagagtacagtggcgcgatcttggctcactgcaatctccacctcccccaggttcaagcaattcccctgcctcagcctcctgagtagctgggactacaggcacgcaccaccatgccaggctaatttttttgtatgttagcagagatggggtttcaccatgttggccaggatggtctcaatctcctgacctcatgatccgcacaacttggcctccaaaagtgctgggattacaagcgtgagccaccgcgcccggccctaaacatcatttttaagagcattgggatatttcctgaaaaggtttatgaaaaagaagaatctcatctcagtgaagaatacttctcatttttaaaaaaagcttaaaactttgaagttagctttaacttaaatagtatttcccatttatcgcagaccttttttaggaagcaagcttaatgcctgataattttgaattccctttcttgcaggaagggctatgaaaagctagaattgagtgtttaaagttcaacatgttatttgtaatagatgtttaatagatgttctgctactttgctgctatggttttctccaagagctacataatttagtttcatataaagtatcatcagtgtagaacctaattcagttcaaagctgtgtgtttggaagactatcttactatttcacaacagcctgacaacatttctatagccaaaaatagctaaatacctcaatcagtctcagaatgtcattttggtactttggtggccacacaagccattattcactagtatgactagttgtgtctggcagtttatatttaactctctttatttctgtggattttttccttcaaagtttaataaatttattttcttggattcctgatagtgtgcttctgttatcaaacaccaacataaaaatcatctaaaccactctgtatactgtgaattatcattgtaaggagagcttagcaccactggatcaaatacatcagccctgggtatggagatttttatgggctgggatatagagagggaaacataaaccccttcccttattttttgaggagacaaaagcccagctcagaaatatcctactggcttggccctccccttaggctgtgactccccatgggcaaaggttcatagagctgtgtatttgatgcatcatagaaaataaatgacatgggtgtggagtgagggagagtgacatgtgagcattatctttatatttccagcttgagcatgttgtctggaaggaaggaaagcagctcttcctctgccattcacccattggcctaactcagtttattggactagctgcttgttatcatgggaatcagctaataagtcaggcttgggagaaaagctgattaggtaggttgtgtaggagcttgagagagccatgaagtatagattcctacaacaggaggcaggctgcaggtgaggtggctactgaaccctaggctcctgagcaggcactggattctgaaatgtaggaatctggtgatgacattgataaatctactaaacaatgaggtattacttcagcaagtcgaatgcaaaatgccacaactttctataatactcaagggttatatttaaaaaaaaaaaaaaaagtcttcatctgctgccttctgccctgtgagcagtcattacctgaaagaactatggagtgaagcctcagggattcttcatatggatgctttaaggtatgaggagtatagggaaaaggaagcctgcctacttccatggattgaaataacacagttctgtttcagaagattaatgatgtgttgaaaatggctacacacgtttcagcatttcagtttctcaaagtttctaacactttattcaagtgctataatatttacatatttacatatttttataccaaaatatgtctttttatgtgcttgttatgtgggtaagaaatagtgaccagaaaaaccagaagttacttaaatataaactttttagtttggaatccaaaatcccacataatttgccccagtctcctttgacagtttagaatttaagacctagatgtaaatatgtctggaataggtggcttcttggtctcactgacttcaagaatgaagctgcagacccttgtggtgttacagttcttaaagatggtgtgtccggagtttgt

SEQ ID NO: 2297 - DNA, 24 bp, Artificial sequence
  Primer
cgagttcagtgaggtgctctatgt

SEQ ID NO: 2298 - DNA, 26 bp, Artificial sequence
  Primer
aagagccatggaaagtagaaatcttc

SEQ ID NO: 2299 - DNA, 19 bp, Artificial sequence
  Probe
ttcctcagatgagccaatt

SEQ ID NO: 2300 - DNA, 27 bp, Artificial sequence
  Synthetic oligonucleotide
gcgtttgctcttcttcttgcgtttttt

SEQ ID NO: 2301 - DNA, 20 bp, Artificial sequence
  Synthetic oligonucleotide
gagacttttccttgtacaca

SEQ ID NO: 2302 - DNA, 4178 bp, Mus musculus
gacaacccacgagctgccaagcagggcgcagccatgggaagaggaggcggtctagggagcggcggcactggcagaggcggctgctacagcggcggtggcggcgacggctgttactgaaccccggcagccgcggggatcccgggctgggtccacgcgggcctgaggcctcggctccagcagcccccaagcggacacgaacccgcgttctgtctcccgaggcgaaactccgaggtctcaggtatggatctttgtcaggtcttcttaaccttggcactggcagtcaccagcagcacattttctggaagtgaggctacaccagctactcttggcaaagcttccccagttctgcaaagaatcaatccaagcctggggacaagttcttctggaaagcctcgattcaccaagtgtcgttcccctgaactggagacattttcatgctactggacagaaggagataatcctgatttaaagaccccaggatctattcagctgtactatgctaaaagggaaagccaacgacaagctgcaagaattgctcatgaatggacccaggaatggaaagaatgccctgattatgtctctgctggaaaaaacagctgttacttcaactcatcatatacctccatttggataccctactgcatcaagctaactacaaatggtgatttgctggaccaaaaatgtttcactgttgacgaaatagtgcaacctgatccacccattggcctcaactggactttactaaacattagtttgaccgggattcgtggagacatccaagtgagttggcaaccaccacccaatgcagatgttctgaagggatggataattctggagtatgaaattcagtacaaagaagtaaatgaatcaaaatggaaagtgatgggccctatatggttaacatactgtccagtgtactcattgagaatggataaagaacatgaagtgcgggtgagatccagacaacggagctttgaaaagtacagcgagttcagcgaagtcctccgtgtaatatttcctcagacgaacatattggaagcatgtgaagaagatatccagtttccatggttcttaattattatctttggaatatttggagtagcagtgatgctatttgtagttatattttcaaagcagcaaaggattaagatgctgattttacccccagtcccagttccaaagattaaagggattgatccagatcttctcaaggaagggaagttggaggaggtgaacaccatcttaggcattcatgataactacaaacccgacttctacaatgatgattcctgggtcgagttcattgagctagatattgatgaagcagatgtggatgagaagactgaagggtctgacacagacagacttctaagcaatgatcatgagaaatcagctggtatccttggagcaaaggatgatgattctgggcgtaccagctgttacgaccctgacattttggatactgatttccataccagtgacatgtgtgatggtaccttgaagtttgctcagtcacagaagttaaatatggaagctgatctcttgtgccttgatcagaagaatctgaagaacttgccttatgatgcttcccttggctctctgcatccctccattacccagacagtagaagaaaacaagccacagccacttttgagcagcgaaactgaggcaacccaccaactcgcctctacaccgatgagtaatcccacatcactggcaaacattgacttttatgcccaagtaagcgacattacaccagcaggtggtgtagtcctttccccaggccaaaagattaaggcagggatagcccaaggcaatacccagcgggaggtggccacgccctgccaagaaaattacagcatgaacagtgcctacttttgtgagtcagatgccaaaaaatgcatcgctgtggcccctcgcatggaagccacgtcttgtataaaaccaagctttaaccaagaggacatttacatcaccacagaaagccttaccactactgcccagatgtctgagacagcagatattgctccagatgctgagatgtctgtcccagactacaccacggttcacaccgtgcagtctccaaggggccttatactcaacgcaactgctttgcctttgcctgacaaaaagaattttccctcctcgtgtggttatgtgagcacagaccaactgaacaaaatcatgcagtagcctttcctatctttaatggcaagggaaaggctgggcacaaacgcttaaaccaaaactatgttttaaatctgtgttgggagagcatgagagtggatatggattctaaaatactttttctggaaatgtcaaaatatcataaagtggaaaatcaagaattcgtaatcagataaatgctcccattgtgaattataaatattttaatgaattgtctttaagactgtatagtggcagtgattgtctgtactgtgggtcttaattttgtgatactaagcattaaatagctacgttttttatgtatgtagatcatgctttttgaaaaagcaaaacaatcaggtggcttttgcagttcaggaaattgaatgcagattatagcacaggctgattttttttttcttttttaaataactgggaactaaaactctaggtgagaaggtaaaactagtttggatatgcaaaacatttattttgacatgaaattgataaagatatttttaataatttacactttaagcatgagtactttataatatgctacacacatattgtagttcagaacaatccatctaaggatgtagcagctacagtgtaaagagggtttcatgttttggtcaatgaacgtaaagaaaaccaaacaagttagatttttacaaagcccttttataacttccaaaacttcttaactctaaaaatgtctaataacctgcattattagaaaaaaacattttaaatttgtaaacgaatatttttttaattttgaaaactttatttttttttaatgttgaatcaacgtatcatacaccaaacagtaaacagaaattataataatggaagaagtgctttcttcgacaaatttccattcaagccacacagctacatgtaagagaagtagaagtgatgtggtgtgattggctaggatgcagaagagcttcaggaatacaagaagtgagagcccaaggattgggaggagggggctctcacatctccacagtgcagtctgtcaaacccagcttggtttttatagtattctaagaattattgtgtacaaggaaaagtctcacatgtatgaaatccagtatccagatggggtaaagttagcagataataggataggaaattaaagacctagatcttttttcacagacagacacaaatttttaattcagggagaagggacagaataaatgacttcccactcacaaagcacaactcagaagtaattaaacaggtaacagaaaccttgccatcaaacctttgataagatgtattttaagtagtaagcagtatttcaatgcttcttacttaccctcccaggacaaccgatctcaaataagggagataaggtagataaaaatcactttttgattctgtaataacataaacatagttctttgggttagcaccccccccaaaaaaaatttatgggagaaagaggactctcagctgactgaagaatacatctcatttaaatattttttagatgcctgaaactttaaaattacctttaagttttaatggtatttaccattttgccaagacctttgtggggaaacaagcttaatgtttagtgattttgaaatctctttcatgcaggagagacagtgaaaatctagccttgggtgtttaaggttcgccttgttactttgtaatagattttaataagtttttctgctactttgctgctatggtttctccaatggctacatgatttagttcatatgaagtatcatcaacttagaatctattcagcttaaagatgtgtgttttgatgaactatcttaccatttcaccataggctgaccacgtttctatagccaaaaatagctaaatacctcaatcagttccagaatgtcattttttggtactttgctggccacacaagccgttattcaccgtttaactagttgtgttctgcagtctatatttaactttctttatgtctgtggatttttcccttcaaagttcaataaatttattttcttggaaaa

What is claimed:

1-5. (canceled)

6. A compound comprising a modified oligonucleotide of 10 to 30 linked nucleosides in length, wherein the modified oligonucleotide has a nucleobase sequence comprising a portion of at least 8 contiguous nucleobases complementary to an equal length portion of nucleobases 72107-72126, 153921-153940, 159252-159267, 213425-213440, 153004-153019, 155597-155612, 248233-248248 of SEQ ID NO: 2.

7. (canceled)

8. (canceled)

9. The compound of claim 6, wherein the modified oligonucleotide comprises at least one modified sugar.

10. The compound of claim 9, wherein the at least one modified sugar comprises a 2′-O-methoxyethyl group.

11. The compound of claim 9, wherein the at least one modified sugar is a bicyclic sugar.

12. The compound of claim 11, wherein the bicyclic sugar comprises a 4′-CH(CH3)-O-2′ group.

13. The compound of claim 11, wherein the bicyclic sugar comprises a 4′-CH2-O-2′ or 4′-(CH2)2-O-2′ group.

14. The compound of claim 6, wherein the modified oligonucleotide comprises at least one modified internucleoside linkage.

15. The compound of claim 14, wherein the modified internucleoside linkage is a phosphorothioate internucleoside linkage.

16. The compound of claim 6, wherein the modified oligonucleotide comprises at least one modified nucleobase.

17. The compound of claim 16, wherein the modified nucleobase is 5-methylcytosine.

18. The compound of claim 6, wherein the modified oligonucleotide comprises:
a gap segment consisting of linked deoxynucleosides;
a 5′ wing segment consisting of linked nucleosides; and
a 3′ wing segment consisting of linked nucleosides;
wherein the gap segment is positioned between the 5′ wing segment and the 3′ wing segment and wherein each nucleoside of each wing segment comprises a modified sugar.

19. A compound comprising a modified oligonucleotide 10 to 30 linked nucleosides in length and having a nucleobase sequence comprising the sequence recited in SEQ ID NO: 918, 479, 703, 1800, 1904, 2122, 2127, or 2194.

20. The compound of claim 19, wherein the modified oligonucleotide has a nucleobase sequence comprising the sequence recited in SEQ ID NOs: 918, 479 or 703, wherein the modified oligonucleotide comprises
a gap segment consisting of ten linked deoxynucleosides;
a 5′ wing segment consisting of five linked nucleosides; and
a 3′ wing segment consisting of five linked nucleosides;
wherein the gap segment is positioned between the 5′ wing segment and the 3′ wing segment, wherein each nucleoside of each wing segment comprises a 2′-O-methoxyethyl sugar; wherein each internucleoside linkage is a phosphorothioate linkage and wherein each cytosine is a 5-methylcytosine.

21. The compound of claim 19, wherein the modified oligonucleotide has a nucleobase sequence comprising the sequence recited in SEQ ID NOs: 1800, 1904, 2122, 2127, or 2194, wherein the modified oligonucleotide comprises:
a gap segment consisting of ten linked deoxynucleosides;
a 5′ wing segment consisting of 3 linked nucleosides; and
a 3′ wing segment consisting of 3 linked nucleosides;
wherein the gap segment is positioned between the 5′ wing segment and the 3′ wing segment, wherein each nucleoside of each wing segment comprises a 2′-O-methoxyethyl sugar or a constrained ethyl sugar; and wherein each internucleoside linkage is a phosphorothioate linkage.

22-32. (canceled)

33. The compound of claim 19, comprising a single-stranded modified oligonucleotide consisting of 20 linked nucleosides having a nucleobase sequence consisting of SEQ ID NO: 703, wherein the modified oligonucleotide comprises:
a gap segment consisting of ten linked deoxynucleosides;
a 5′ wing segment consisting of five linked nucleosides; and
a 3′ wing segment consisting of five linked nucleosides;
wherein the gap segment is positioned between the 5′ wing segment and the 3′ wing segment; wherein each nucleoside of each wing segment comprises a 2′-O-methoxyethyl sugar; wherein each internucleoside linkage is a phosphorothioate linkage; and wherein each cytosine is a 5-methylcytosine.

34-37. (canceled)

38. A composition comprising the compound of claim 6 or salt thereof and at least one of a pharmaceutically acceptable carrier or diluent.

39. A method of treating a disease associated with excess growth hormone in a human comprising administering to the human a therapeutically effective amount of the compound or composition of claim 6, thereby treating the disease associated with excess growth hormone.

40. The method of claim 39, wherein the disease associated with excess growth hormone is acromegaly.

41. The method of claim 40, wherein the treatment reduces IGF-1 levels.

42-52. (canceled)

53. A composition comprising the compound of 19 or salt thereof and at least one of a pharmaceutically acceptable carrier or diluent.
